(19) United States
(12) Patent Application Publication
(10) Pub. No.: US 2005/0037946 A1
(43) Pub. Date: Feb. 17, 2005

(54) Methods and compositions for treating cardiovascular disease using 1722, 10280, 59917, 85553, 10653, 9235, 21668, 17794, 2210, 6169, 10102, 21061, 17662, 1468, 12282, 6350, 9035, 1820, 23652, 7301, 8925, 8701, 3533, 9462, 9123, 12788, 17729, 65552, 1261, 21476, 33770, 9380, 2569654, 33556, 53656, 44143, 32612, 10671, 261, 44570, 41922, 2552, 2417, 19319, 43969, 8921, 8993, 955, 32345, 966, 1920, 17318, 1510, 14180, 26005, 554, 16408, 42028, 112091, 13886, 13942, 1673, 54946 or 2419

(75) Inventors: Nancy E. Stagliano, North Reading, MA (US); Aileen Healy, Medford, MA (US); Susan L. Acton, Lexington, MA (US); Katherine M. Galvin, Jamaica Plain, MA (US); Mary A. Donoghue, Belmont, MA (US); Amelie Rodrigue-Way, Lasalle (CA); James E. Tomlinson, Burlingame, CA (US)

Correspondence Address: MILLENNIUM PHARMACEUTICALS, INC., 40 Landsdowne Street, CAMBRIDGE, MA, 02139, US

(73) Assignee: Millennium Pharmaceuticals, Inc.

(21) Appl. No.: 10/753,267

(22) Filed: Jan. 8, 2004

Related U.S. Application Data
(60) Provisional application No. 60/439,683, filed on Jan. 13, 2003.
(60) Provisional application No. 60/445,216, filed on Feb. 5, 2003.
(60) Provisional application No. 60/448,036, filed on Feb. 18, 2003.
(60) Provisional application No. 60/454,189, filed on Mar. 12, 2003.
(60) Provisional application No. 60/457,541, filed on Mar. 25, 2003.
(60) Provisional application No. 60/466,411, filed on Apr. 29, 2003.
(60) Provisional application No. 60/469,041, filed on May 8, 2003.
(60) Provisional application No. 60/477,414, filed on Jun. 10, 2003.
(60) Provisional application No. 60/478,560, filed on Jun. 13, 2003.
(60) Provisional application No. 60/489,772, filed on Jul. 24, 2003.
(60) Provisional application No. 60/490,660, filed on Jul. 28, 2003.
(60) Provisional application No. 60/499,838, filed on Sep. 3, 2003.
(60) Provisional application No. 60/504,786, filed on Sep. 22, 2003.
(60) Provisional application No. 60/505,570, filed on Sep. 24, 2003.
(60) Provisional application No. 60/512,418, filed on Oct. 17, 2003.
(60) Provisional application No. 60/514,660, filed on Oct. 27, 2003.

(51) Int. Cl. A61K 31/00

(52) U.S. Cl. 514/1

(57) ABSTRACT

The present invention relates to methods for the diagnosis and treatment of cardiovascular disease, including, but not limited to, atherosclerosis, reperfusion injury, hypertension, restenosis, arterial inflammation, thrombosis and endothelial cell disorders. Specifically, the present invention identifies the differential expression of 1722, 10280, 59917, 85553, 10653, 9235, 21668, 17794, 2210, 6169, 10102, 21061, 17662, 1468, 12282, 6350, 9035, 1820, 23652, 7301, 8925, 8701, 3533, 9462, 9123, 12788, 17729, 65552, 1261, 21476, 33770, 9380, 2569654, 33556, 53656, 44143, 32612, 10671, 261, 44570, 41922, 2552, 2417, 19319, 43969, 8921, 8993, 955, 32345, 966, 1920, 17318, 1510, 14180, 26005, 554, 16408, 42028, 112091, 13886, 13942, 1673, 54946 and 2419 genes in cardiovascular disease states, relative to their expression in normal, or non-cardiovascular disease states, and/or in response to manipulations relevant to cardiovascular disease. The present invention describes methods for the diagnostic evaluation and prognosis of various cardiovascular diseases, and for the identification of subjects exhibiting a predisposition to such conditions. The invention also provides methods for identifying a compound capable of modulating cardiovascular disease. The present invention also provides methods for the identification and therapeutic use of compounds as treatments of cardiovascular disease.

### RELATED APPLICATIONS

[0001] The present application claims the benefit of U.S. Provisional Application Ser. No. 60/439,683, filed on Jan. 13, 2003, of U.S. Provisional Application Ser. No. 60/445,216, filed on Feb. 5, 2003, of U.S. Provisional Application Ser. No. 60/448,036, filed on Feb. 18, 2003, of U.S. Provisional Application Ser. No. 60/454,189, filed on Mar. 12, 2003, of U.S. Provisional Application Ser. No. 60/457,541, filed on Mar. 25, 2003, of U.S. Provisional Application Ser. No. 60/466,411, filed on Apr. 29, 2003, of U.S. Provisional Application Ser. No. 60/469,041, filed on May 8, 2003, of U.S. Provisional Application Ser. No. 60/477,414, filed on Jun. 10, 2003, of U.S. Provisional Application Ser. No. 60/478,560, filed on Jun. 13, 2003, of U.S. Provisional Application Ser. No. 60/489,772, filed on Jul. 24, 2003, of U.S. Provisional Application Ser. No. 60/490,660, filed on Jul. 28, 2003, of U.S. Provisional Application Ser. No. 60/499,838, filed on Sep. 3, 2003, of U.S. Provisional Application Ser. No. 60/504,786, filed on Sep. 22, 2003, of U.S. Provisional Application Ser. No. 60/505,570, filed on Sep. 24, 2003, of U.S. Provisional Application Ser. No. 60/512,418, filed on Oct. 17, 2003 and of U.S. Provisional Application Ser. No. 60/514,660, filed on Oct. 27, 2003. The entire contents of these provisional patent applications are hereby incorporated in their entirety by this reference.

### BACKGROUND OF THE INVENTION

[0002] Cardiovascular disease is a major health risk throughout the industrialized world. Atherosclerosis, the most prevalent of cardiovascular diseases, is the principal cause of heart attack, stroke, and peripheral vascular disease resulting in significant disability and limb loss, and thereby the principle cause of death in the United States.

[0003] Atherosclerosis is a complex disease involving aspects of lipid metabolism and vascular inflammation. Both have significant effects on the initiation and progression of atherosclerosis. Irregular lipid metabolism, is a very well established risk factor for atherosclerosis. Elevated low density lipoprotein (LDL), very low density lipoproteins (VLDL), triglycerides and low levels of high density lipoproteins (HDL) all independently contribute to atherosclerosis development and/or progression. There are a number of effective therapies currently being utilized in the clinic that result in lowering of these risk factors and, in turn decrease the rate of mortality and morbidity associated with atherosclerotic disease. Some of these therapies include the cholesterol lowering drugs statins, the triglyceride lowering drugs fibrates and niacin and the triglyceride lowering/HDL raising PPAR alpha activators. There is a need to identify new targets for atherosclerosis therapy.

[0004] There have been significant advances made in understanding the role that inflammation plays in the process of atherosclerosis. Atherosclerosis involves many cell types and molecular factors (described in, for example, Ross (1993) Nature 362: 801-809). The process, in normal circumstances a protective response to insults to the endothelium and smooth muscle cells (SMCs) of the wall of the artery, consists of the formation of fibrofatty and fibrous lesions or plaques, preceded and accompanied by inflammation. The advanced lesions of atherosclerosis may occlude the artery concerned, and result from an excessive inflammatory-fibroproliferative response to numerous different forms of insult. Injury or dysfunction of the vascular endothelium is a common feature of many conditions that predispose an individual to accelerated development of atherosclerotic cardiovascular disease. There has been considerable effort in establishing that hypertension contributes to atherosclerosis. The identification of molecules that regulate blood pressure and vascular tone will be useful in discovering new therapies to treat cardiovascular diseases such as atherosclerosis.

### DETAILED DESCRIPTION OF THE INVENTION

[0005] The present invention provides methods and compositions for the diagnosis and treatment of cardiovascular disease. As used herein, disorders involving the heart, or “cardiovascular disease” or a “cardiovascular disorder” include a disease or disorder which affects the cardiovascular system, e.g., the heart, the blood vessels, and/or the blood. A cardiovascular disorder can be caused by an imbalance in arterial pressure, a malfunction of the heart, or an occlusion of a blood vessel, e.g., by a thrombus. A cardiovascular disorder includes, but is not limited to disorders such as arteriosclerosis, atherosclerosis, cardiac hypertrophy, ischemia reperfusion injury, restenosis, arterial inflammation, vascular wall remodeling, ventricular remodeling, rapid ventricular pacing, coronary microembolism, tachycardia, bradycardia, pressure overload, aortic bending, coronary artery ligation, vascular heart disease, valvular disease, including but not limited to, valvular degeneration caused by calcification, rheumatic heart disease, endocarditis, or complications of artificial valves; atrial fibrillation, long-QT syndrome, congestive heart failure, sinus node dysfunction, angina, heart failure, hypertension, high blood pressure, atrial fibrillation, atrial flutter, pericardial disease, including but not limited to, pericardial effusion and pericarditis; cardiomyopathies, e.g., dilated cardiomyopathy or idiopathic cardiomyopathy, myocardial infarction, coronary artery disease, coronary artery spasm, ischemic disease, arrhythmia, sudden cardiac death, cardiovascular disorders caused by lipoprotein metabolism disorders, including but not limited to, hyperlipidemia, dyslipidemia, hypercholesterolemia, hypertriglyceridemia and hyperlipoproteinemia; and cardiovascular developmental disorders (e.g., arteriovenous malformations, arteriovenous fistulae, raynaud's syndrome, neurogenic thoracic outlet syndrome, causalgia/reflex sympathetic dystrophy, hemangioma, aneurysm, cavernous angioma, aortic valve stenosis, atrial septal defects, atrioventricular canal, coarctation of the aorta, ebsteins anomaly, hypoplastic left heart syndrome, interruption of the aortic arch, mitral valve prolapse, ductus arteriosus, patent foramen ovale, partial anomalous pulmonary venous return, pulmonary atresia with ventricular septal defect, pulmonary atresia without ventricular septal defect, persistance of the fetal circulation, pulmonary valve stenosis, single ventricle, total anomalous pulmonary venous return, transposition of the great vessels, tricuspid atresia, truncus arteriosus, ventricular septal defects). A cardiovascular disease or disorder also can include an endothelial cell disorder.

[0006] As used herein, an “endothelial cell disorder” includes a disorder characterized by aberrant, unregulated, or unwanted endothelial cell activity, e.g., proliferation, migration, angiogenesis, or vascularization; or aberrant expression of cell surface adhesion molecules or genes associated with angiogenesis, e.g., TIE-2, FLT and FLK. Endothelial cell disorders include tumorigenesis, tumor metastasis, psoriasis, diabetic retinopathy, endometriosis, Grave's disease, ischemic disease (e.g., atherosclerosis), and chronic inflammatory diseases (e.g., rheumatoid arthritis).

[0007] A cardiovascular disease can also include thrombosis. Thrombosis can result from platelet dysfunction, e.g. seen in myocardial infarction, angina, hypertension, lipid disorders, diabetes mellitus; myelodysplastic syndromes; myeloproliferative syndromes (including polycythemia vera and thombocythemia); thrombotic thrombocytopenic purpuras; HIV-induced platelet disorders (AIDS-Thrombocytopenia); heparin induced thrombocytopenia; mural cell alterations/interactions leading to platelet aggregation/degranulation, vascular endothelial cell activation/injury, monocyte/macrophage extravasation and smooth muscle cell proliferation; autoimmune disorders such as, but not limited to vasculitis, antiphospholipid syndromes, systemic lupus erythromatosis; inflammatory diseases, such as, but not limited to Immune activation; graft vs. host disease; radiation induced hypercoagulation; clotting factor dysregulation either hereditary (autosomal dominant or recessive) such as, but not limited to clotting factor pathways including protein C/S, Anti-thrombin III deficiency, and the Factor V Leiden mutation or acquired such as but not limited to autoimmune, cancer -associated and drug-induced dysregulation of clotting factors.

[0008] “Treatment”, as used herein, is defined as the application or administration of a therapeutic agent to a patient, or application or administration of a therapeutic agent to an isolated tissue or cell line from a patient, who has a disease or disorder, a symptom of disease or disorder or a predisposition toward a disease or disorder, with the purpose of curing, healing, alleviating, relieving, altering, remedying, ameliorating, improving or affecting the disease or disorder, at least one symptom of disease or disorder or the predisposition toward a disease or disorder. A therapeutic agent includes, but is not limited to, small molecules, peptides, antibodies, ribozymes and antisense oligonucleotides. Representative molecules are described herein.

[0009] The present invention is based, at least in part, on the discovery that nucleic acid and protein molecules, (described infra), are differentially expressed in cardiovascular disease states relative to their expression in normal, or non-cardiovascular disease states. The modulators of the molecules of the present invention, identified according to the methods of the invention can be used to modulate (e.g., inhibit, treat, or prevent) or diagnose cardiovascular disease, including, but not limited to, atherosclerosis and thrombosis.

[0010] “Differential expression”, as used herein, includes both quantitative as well as qualitative differences in the temporal and/or tissue expression pattern of a gene. Thus, a differentially expressed gene may have its expression activated or inactivated in normal versus cardiovascular disease conditions (for example, in an experimental cardiovascular disease system such as in an animal model for atherosclerosis). The degree to which expression differs in normal versus cardiovascular disease or control versus experimental states need only be large enough to be visualized via standard characterization techniques, e.g., quantitative PCR, Northern analysis, subtractive hybridization. The expression pattern of a differentially expressed gene may be used as part of a prognostic or diagnostic cardiovascular disease, e.g., artherosclerosis and/or thrombosis, evaluation, or may be used in methods for identifying compounds useful for the treatment of cardiovascular disease, e.g., atherosclerosis and/or thrombosis. In addition, a differentially expressed gene involved in cardiovascular disease may represent a target gene such that modulation of the level of target gene expression or of target gene product activity will act to cure, heal, alleviate, relieve, alter, remedy, ameliorate, improve or affect a cardiovascular disease condition, e.g., atherosclerosis and/or thrombosis. Compounds that modulate target gene expression or activity of the target gene product can be used in the treatment of cardiovascular disease. Although the genes described herein may be differentially expressed with respect to cardiovascular disease, and/or their products may interact with gene products important to cardiovascular disease, the genes may also be involved in mechanisms important to additional cardiovascular cell processes.

[0011] Molecules of the Present Invention

[0012] Gene ID 1722

[0013] The human 1722 sequence (SEQ ID NO:1), known also as a serine/threonine protein kinase (Protein Kinase C mu or PKD), is approximately 3742 nucleotides long including untranslated regions. The coding sequence, located at about nucleic acids 236 to 2974 in SEQ ID NO:1, encodes a 912 amino acid protein (SEQ ID NO:2).

[0014] As determined by TaqMan analysis, 1722 mRNA was expressed in a variety of human tissues, including bladder, kidney, ovary, pituitary gland and veins. Additionally, 1722 mRNA was expressed in cultured smooth muscle cells, endothelial cells and normal human arteries. In rats treated with antihypertensive agents for three days, expression of 1722 mRNA was upregulated in aortas compared to vehicle treated controls. In spontaneously hypertensive rats, there was a significant upregulation (3 fold) of 1722 mRNA in aortas of the stroke-prone strain at 15 weeks of age compared to Wistar Kyoto (WKY) normotensive age-matched controls. In renin transgenic rats, there was downregulation of 1722 mRNA in aortas compared to wildtype Sprague-Dawley controls at 5 and 15 weeks of age.

[0015] 1722 is a serine/threonine protein kinase known as Protein Kinase C mu or PKD (Zugaza et al., J Biol Chem, 272 (8), 23952-23960). It is a phorbol-ester/DAG-stimulated protein kinase. Factors known to be involved in vascular signaling, including angiotensin, endothelin, and vasopressin activate 1722 and cause downstream activation of other kinases, such as JNK and MAPK. Resveratrol, an antioxidant, has been shown to inhibit the autophosphorylation of 1722 (Biochem Pharmacol. 2001 Dec. 15;62(12):1647-51.) Resveratrol is the substance found in red wine which shows a beneficial effect in cardiovascular disease. Our expression and regulation data indicate that inhibition of 1722 kinase will result in a beneficial effect by reducing well known vasoconstrictor signaling cascades. The expression of 1722 mRNA is enhanced in hypertensive states and is expressed in relevant tissues involved in blood pressure maintenance (veins, arteries, kidney and skeletal muscle). Due to 1722 mRNA expression in smooth muscle cells, endothelial cells and normal human arteries, along with its functional role, modulators of 1722 activity would be useful in treating disorders associated with cardiovascular disease, including but not limited to atherosclerosis. 1722 polypeptides of the present invention are useful in screening for modulators of 1722 activity.

[0016] Gene ID 10280

[0017] The human 10280 sequence (SEQ ID NO:3), known also as protein L-isoaspartyl methyltransferase (PIMT), is approximately 1599 nucleotides long including untranslated regions. The coding sequence, located at about nucleic acid 74 to 757 of SEQ ID NO:3, encodes a 227 amino acid protein (SEQ ID NO:4).

[0018] As determined by TaqMan analysis, 10280 mRNA was expressed at high levels in brain, in megakaryocytes generated in vitro and in erythroid cells generated in vitro. 10280 mRNA was also expressed in heart. In addition, 10280 mRNA was detected at high levels in the platelets of patients with coronary artery disease and in platelets from normal volunteers.

[0019] Protein L-isoaspartyl methyltransferase or PIMT (10280), catalyzes the carboxyl methylation of isoaspartyl sites on deamidated asparaginyl residues [PNAS.1987. 84(9):2595-2599]. This activity is suggested to play a role in protein repair/degradation [PNAS. 1997. 94;6132-6137]. Calmodulin, an important mediator of platelet activation, is a target for PIMT, and studies demonstrate that inhibition of PIMT increases the degradation of calmodulin [JBC. 2002. 277(32); 28972-28980; JBC.1998. 273(4);28516-28523]. Based on the literature and our expression data, inhibition of 10280 and the subsequent degradation of Calmodulin would create platelets that were less reactive to prothrombotic stimuli. Therefore, inhibition of 10280 would provide a means to inhibit platelet reactivity and thrombus formation. Due to 10280 mRNA expression in the brain, in megakaryocytes generated in vitro and in erythroid cells generated in vitro, along with its functional role, modulators of 10280 activity would be useful in treating disorders associated with cardiovascular disease, including but not limited to thrombosis and atherosclerosis. 10280 polypeptides of the present invention are useful in screening for modulators of 10280 activity.

[0020] Gene ID 59917

[0021] The human 59917 sequence (SEQ ID NO:5), known also as a choline transporter-like protein, is approximately 4301 nucleotides long including untranslated regions. The coding sequence, located at about nucleic acid 43 to 2016 of SEQ ID NO:5, encodes a 657 amino acid protein (SEQ ID NO:6).

[0022] As determined by TaqMan analysis, 59917 mRNA was expressed at very high levels in megakaryocytes generated in vitro and in brain. 59917 mRNA was also expressed in endothelial cells. 59917 mRNA was detected in the platelets of patients with coronary artery disease and at lower levels in platelets from normal volunteers.

[0023] 59917 or choline transporter-like protein is known to be expressed in dendritic cells [JI. 2001. 167:5795-5804]. Choline transport is presumed to be an important regulatory step in the formation of phosphatidylcholine, an important component of the plasma membrane. Therefore, choline uptake is required for platelet reactivity. Activated platelets release biologically active phospholipids into the plasma where they negatively affect hemostasis [JBC.2002. 277(50):48737-48744]. Based on the literature and our expression data, inhibition of 59917 would decrease platelet reactivity and inhibit thrombus formation. Due to 59917 mRNA expression in megakaryocytes generated in vitro and in brain, along with its functional role, modulators of 59917 activity would be useful in treating disorders associated with cardiovascular disease including but not limited to thrombosis and atherosclerosis. 59917 polypeptides of the present invention are useful in screening for modulators of 59917 activity.

[0024] Gene ID 85553

[0025] The human 85553 sequence (SEQ ID NO:7), known also as a carbonic anhydrase, is approximately 3564 nucleotides long including untranslated regions. The coding sequence, located at about nucleic acid 52 to 840 of SEQ ID NO:7, encodes a 262 amino acid protein (SEQ ID NO:8).

[0026] As assessed by TaqMan analysis, 85553 mRNA was expressed at high levels in megakaryocytes generated in vitro and in the brain. 85553 mRNA was also expressed at lower levels in kidney, small intestine and colon. 85553 RNA was detected in the platelets of patients with coronary artery disease and in platelets from normal volunteers.

[0027] 85553 is 60% identical to human carbonic anhydrase. Inhibition of human carbonic anhydrase results in decreased platelet aggregation [BBRC. 1984.121(1):266-70.]. 85553 contains the catalytic domain of carbonic anhydrase indicating that it functions similarly to human carbonic anhydrase. The highly restricted expression profile of 85553 mRNA, together with its functional domains suggest that inhibition of 85553 would decrease platelet reactivity and inhibit thrombus formation. Due to 85553 mRNA expression in megakaryocytes generated in vitro and in brain, along with its functional role, modulators of 85553 activity would be useful in treating disorders associated with cardiovascular disease including but not limited to thrombosis and atherosclerosis. 85553 polypeptides of the present invention are useful in screening for modulators of 85553 activity.

[0028] Gene ID 10653

[0029] The human 10653 sequence (SEQ ID NO:9), known also as Transketolase (EC 2.2.1.1), is approximately 2106 nucleotides long including untranslated regions. The coding sequence, located at about nucleic acid 71 to 1942 of SEQ ID NO:9, encodes a 623 amino acid protein (SEQ ID NO: 10).

[0030] As determined by TaqMan analysis, 10653 mRNA was downregulated by cholesterol in the livers of African Green Monkeys (1.5 fold, p=0.05). This correlates with the downregulation of the control gene HMGCoA Synthase which is involved in cholesterol synthesis. 10653 mRNA was also downregulated in liver by two and six months of cholesterol feeding of the Apolipoprotein E (ApoE) knockout mice (1.3 fold). 10653 mRNA was also downregualted in the livers of marmosets treated with lipid-lowering therapies including niacin, probucol, cerivastatin, fenofibrate, cholestyramine, and gemfibrozil.

[0031] 10653 is a transketolase (TKT), which is an enzyme in the pentose-phosphate pathway and it is most active in the liver (Mol Cell Biochem, 1999, 201:57-63). Transketolase serves as a reversible link between the hexose monophosphate shunt and the glycolytic pathway to regulate NADPH and ribose-5-phosphate synthesis. NADPH is known to be important for fatty acid and steroid synthesis. Transketolase haploinsufficent mice have reduced body fat and reduced liver mass (Mol Cell Biol. 2002, 22:6142-6147). TKT +/− mice had normal growth hormone levels but reduced leptin levels.

[0032] The downregulation of 10653 mRNA expression in the liver by cholesterol feeding is consistent with 10653 playing a role in production of NADPH for cholesterol and triglyceride synthesis for VLDL production. In addition, 10653 regulation mimics that of ApoCII indicating that 10653 plays a role in the generation and/or metabolism of triglyceride-rich particles. Inhibition of 10653 reduces VLDL synthesis by the liver and thereby reduces plasma VLDL cholesterol, LDL cholesterol and triglycerides. Due to 10653 mRNA expression in the liver, along with its functional role, modulators of 10653 activity would be useful in treating disorders associated with cardiovascular disease, including but not limited to heart faliure. 10653 polypeptides of the present invention are useful in screening for modulators of 10653 activity.

[0033] Gene ID 9235

[0034] The human 9235 sequence (SEQ ID NO: 11), known also as Glucosamine-Fructose-6-phosphate Amido Transferase (GFAT), is approximately 3082 nucleotides long including untranslated regions. The coding sequence, located at about nucleic acid 123 to 2168 of SEQ ID NO:11, encodes a 681 amino acid protein (SEQ ID NO:12).

[0035] As determined by TaqMan analysis, 9235 mRNA was downregulated by cholesterol in the livers of African Green Monkeys (1.3 fold, p=0.09). This regulation mimics that of HMGCoA reductase, a gene involved in cholesterol synthesis. 9325 mRNA was also downregulated in liver by two and six months of cholesterol feeding of the Apolipoprotein E (ApoE) knockout mice (1.8 fold). This correlates with the downregulation of the control gene HMGCoA Synthase which is involved in cholesterol synthesis. 9325 mRNA was upregulated in the livers of marmosets treated with niacin (1.3 fold), and cholestyramine (1.4 fold).

[0036] Inhibition of 9325 potentially results in reduced activation of the hexosamine pathway and therefore reduced plasma LDL-C and triglyceride levels. Inhibition of 9325 also results in the protection against glycation-mediated LDL uptake and foam cell formation in the vascular wall of hyperlipidemics. Due to 9325 mRNA expression in the liver, along with its functional role, modulators of 9325 activity would be useful in treating disorders associated with cardiovascular disease including but not limited to heart failure. 9325 polypeptides of the present invention are useful in screening for modulators of 9325 activity.

[0037] Gene ID 21668

[0038] The human 21668 sequence (SEQ ID NO:13), known also as a 17 beta-hydroxysteroid dehydrogenase type 7 (17HSD7), is approximately 1453 nucleotides long including untranslated regions. The coding sequence, located at about nucleic acid 12 to 1037 of SEQ ID NO:13, encodes a 341 amino acid protein (SEQ ID NO:14).

[0039] As assessed by TaqMan analysis, 21668 mRNA was downregulated in paired liver samples of Wake Forest monkeys fed with and without a high cholesterol diet (6 pairs). 21668 mRNA was found to be down 0.71-fold due to a cholesterol diet. In marmoset models treated with cerivastatin and cholestyramine (cholesterol lowering agents), there was a marked increase in 21668 mRNA expression. HMG-CoA synthase was also highly increased in cerivastatin treated monkeys.

[0040] The human 17HSD7 has been mapped to chromosome 10p11.2 which is close to susceptibility loci for hyperlipidemia, obesity and diabetes. Reported studies on comparative phylogenetic analysis and molecular modeling suggest a role for 21668 or 17HSD7 in cholesterogenesis. 21668 or 17HSD7 shows significant homology to the yeast 3-ketosteroid reductase, ERG27, involved in ergosterol biosynthesis (cholesterol equivalent in yeast) (Breitling et al. Mol. Cell. Endocrinol. 2001 Jan. 22; 171 (1-2): 199-204). ERG27 converts zymosterone to zymosterol (precursor to cholesterol and ergosterol).

[0041] 17HSD Type 1, 3 and 7 are responsible for catalyzing estrone to estradiol, type 1 being the main enzyme. However, it is thought that type 7 potentially plays an important role in other pathways in addition to the inactivation of dihydrotestosterone. Since 21668 or 17HSD7 is expressed in the liver (major site of cholesterol synthesis), since its expression pattern in various microarray profiling experiments is similar to other cholesterol synthesis enzymes and since it is significantly homologous to ERG27, 17HSD7 is potentially involved in an alternative pathway to cholesterol synthesis where it converts a cholesterol ketone precursor to the corresponding alcohol. Due to 21668 mRNA expression in the liver, along with its functional role, modulators of 21688 activity would be useful in treating disorders associated with cardiovascular disease including but not limited to heart failure. 21688 polypeptides of the present invention are useful in screening for modulators of 21688 activity.

[0042] Gene ID 17794

[0043] The human 17794 sequence (SEQ ID NO:15), known also as Pyruvate Dehydrogenase Kinase 3 (PDK3), is approximately 1599 nucleotides long including untranslated regions. The coding sequence, located at about nucleic acid 23 to 1243 of SEQ ID NO:15, encodes a 406 amino acid protein (SEQ ID NO:16).

[0044] As assessed by TaqMan analysis, 17794 mRNA has a fairly restricted expression profile in human tissues, including high expression in arteries, veins, CNS structures, ovary and pituitary gland. Additionally, 17794 mRNA was also expressed in cultured smooth muscle cells and endothelial cells. There was a significant (t-test, p<0.05) upregulation of 17794 mRNA in human failing hearts compared to non-failing controls.

[0045] 17794 is known as pyruvate dehydrogenase kinase 3 (PDK3) and it is a mitochondrial isoform of the enzyme (J Bio Chem, Baker et al., 275; 15773-15781, 2000). The 17794 protein acts to inhibit the pyruvate dehydrogenase complex, which converts pyruvate to acetyl CoA. A non-specific inhibitor of PDK isoforms, dichloroacetate (DCA) has been shown to improve cardiac function in both rats and humans (Am J Physiol Heart Circ Physiol, Taniguchi et al., 280; H1762-1769, 2001 and Clin Sci (Lond), Ludvik et al., 80; 47-51, 1991). Specifically, DCA reduced peripheral vascular resistance after two intravenous bolus doses in humans. In patients with pulmonary arterial hypertension, oral DCA promoted a more oxidized redox state by restoring voltage-gated potassium channel expression (Kv) (Adv Exp Med Biol, Michelakis et al., 502; 401-418, 2001). Inhibiting 17794 with a more specific and potent inhibitor than DCA would produce a vessel-enriched increase in K+ currents resulting in decreased Ca2+ influx and vasodilation. In addition, an improvement in cardiac function would result in failing and ischemic myocardium due to increased glucose oxidation and ATP utilization. Due to 17794 mRNA expression in arteries, veins, CNS structures, ovary and pituitary gland, along with its functional role, modulators of 17794 activity would be useful in treating disorders associated with cardiovascular disease including but not limited to heart failiure and atherosclerosis. 17794 polypeptides of the present invention are useful in screening for modulators of 17794 activity.

[0046] Gene ID 2210

[0047] The human 2210 sequence (SEQ ID NO:17), known also as CaMKK Beta 1, is approximately 1767 nucleotides long. The coding sequence, located at about nucleic acid 1 to 1767 of SEQ ID NO:17, encodes a 588 amino acid protein (SEQ ID NO:18).

[0048] As assessed by TaqMan analysis, 2210 mRNA was expressed in human arteries, veins, HUVECS, skeletal muscle and brain cortex. Further TaqMan analysese indicated that 2210 mRNA was upregulated in spontaneously hypertensive stroke prone (SHR SP) rat aortas at an old age compared to SHR and normotensive Wistar Kyoto (WKY). 2210 mRNA was also upregulated in aortas of rats treated with antihypertensive agents for 3 days. Lastly, 2210 mRNA was upregulated in failing human hearts compared to non-failing hearts as well as in mouse models of heart failure (isoproterenol infusion at old age, aortic banding/pressure overload).

[0049] Inhibition of CaMKK beta 1 will have a beneficial effect on vasculartone and heart disease via the reduction of CaMKI and CaMKIV activity and the blockade of downstream signaling pathways of these kinases. Known targets for CaMK's are transcription factors (ex. CREB) which stimulate the production of such targets as aldosterone synthase (RAS pathway) and CD40L in ECs (relevant to the pathogenesis of atherosclerosis and myocardial infarction) as well as cellular proteins which modulate calcium handling (L-type Ca channel, ryanodine receptor, etc.). CaMKI and CaMKIV induce hypertrophic responses in cardiomyocytes in vitro. CaMKIV overexpressing mice develop cardiac hypertrophy with increased left ventricular end-diastolic diameter and decreased fractional shortening. CaMKIV activates the transcription factor MEF2 through a posttranslational mechanism in the hypertrophic heart in vivo. Due to 2210 mRNA expression in human arteries, veins, HUVECS, skeletal muscle and brain cortex, along with its functional role, modulators of 2210 activity would be useful in treating disorders associated with cardiovascular disease including but not limited to vasculartone and heart failure. 2210 polypeptides of the present invention are useful in screening for modulators of 2210 activity.

[0050] Gene ID 6169

[0051] The human 6169 sequence (SEQ ID NO:19), known also as human ER25, is approximately 1465 nucleotides long including untranslated regions. The coding sequence, located at about nucleic acid 91 to 972 of SEQ ID NO:19, encodes a 293 amino acid protein (SEQ ID NO:20).

[0052] As determined by TaqMan analysis, 6169 mRNA was expressed in the following tissues: brain cortex, liver (fibrosis), erythroid cells, liver, kidney and dorsal root ganglion. 6169 mRNA was also downregulated in the liver by cholesterol feeding in African Green Monkeys (1.3 fold, p=0.02) and by polyunsaturated fatty acids in the diet of African Green Monkeys (1.8 fold, p=0.001). 6169 mRNA was also upregulated by Mevastatin treatment in human primary hepatocytes (2.4 fold) and by Cerivastatin in Marmoset livers (2.4 fold).

[0053] 6169 has not been given an enzymatic classification number. Enzymatic activity of 6169 has not been demonstrated, but it has been suggested based on its 38% identity to the yeast methyl sterol oxidase (ERG25). Data in the literature indicates that a mammalian sterol methyl oxidase exists, but this activity has not been linked to 6169. Our data provides a link between 6169 and mammalian lipid metabolism. Experiments on several models of lipid metabolism in monkeys and man have demonstrated that 6169 gene expression responds both to lipid feeding (cholesterol and polyunsaturated fatty acids) and to cholesterol reduction by chemical inhibition (Mevastatin and Cerivastatin). Together this data indicates that 6169 plays a role in lipid metabolism in primates. Given its homology to yeast methyl sterol oxidase, 6169 potentially plays a direct role in cholesterol metabolism and in the generation of oxysterols which regulate the expression of genes involved in lipid metabolism through FXR and LXR. Due to 6169 mRNA expression in several models of lipid metabolism, along with its functional role, modulators of 6169 activity would be useful in treating disorders associated with cardiovascular disease, including but not limited to atherosclerosis. 6169 polypeptides of the present invention are useful in screening for modulators of 6169 activity.

[0054] Gene ID 10102

[0055] The human 10102 sequence (SEQ ID NO:21), known also as human Myo-inositol-1(or 4)-monophosphatase (EC 3.1.3.25) (IMPase) (IMP) (Inositol monophosphatase) (Lithium-sensitive myo-inositol monophosphatase A1), is approximately 897 nucleotides long including untranslated regions. The coding sequence, located at about nucleic acid 37 to 870 of SEQ ID NO:21, encodes a 277 amino acid protein (SEQ ID NO:22).

[0056] As determined by TaqMan analysis using a human tissue panel, 10102 mRNA was fairly ubiquitously expressed in all of the 40 tissues and cells tested. 10102 mRNA was significantly upregulated by many lipid lowering drugs including Niacin, Cholestyramine, Gemfibrozil, Probucol, and Cerivastatin.

[0057] Enzymatic activity of 10102 has been demonstrated to play a role in generating inositol required for the synthesis of phosphatidylinositol and polyphosphoinositides. The regulation of 10102 by lipid-lowering agents indicates that 10102 may be upregulated to counter the reduction of cholesterol/lipid levels. Since 10102 is known to play a role in signaling, 10102 activity potentially plays a role in the sensing and signaling of lipid availability to cells. Inhibition of 10102 would lead to a reduction in cellular synthesis of lipids and would therefore provide a treatment for excess lipids which are deleterious in atherosclerotic disease. Due to 10102 mRNA upregulation by lipid-lowering agents, along with its functional role, modulators of 10102 activity would be useful in treating disorders associated with cardiovascular disease, including but not limited to atherosclerosis. 10102 polypeptides of the present invention are useful in screening for modulators of 10102 activity.

[0058] Gene ID 21061

[0059] The human 21061 sequence (SEQ ID NO:23), known also as homo sapiens channel kinase 1 (CHAK1, LTRPC7 or TRP-PLIK), is approximately 7280 nucleotides long including untranslated regions. The coding sequence, located at about nucleic acid 214 to 5871 of SEQ ID NO:23, encodes a 1885 amino acid protein (SEQ ID NO:24).

[0060] As determined by TaqMan analysis, 21061 mRNA was predominantly expressed in highly vascularized tissues such as heart, skeletal muscle, liver and kidney. 21061 mRNA was highly expressed in human vascular cells such as coronary smooth muscle cells and umbilical vein endothelial cells. There is a trend for higher expression in arteries compared to veins. There is high expression of 21061 mRNA in CNS structures, including cortex and spinal cord. In rat aortas, 21061 mRNA was expressed at high levels and was regulated in various vascular tone models. Specifically, 21061 mRNA was down-regulated in transgenic renin rat aortas compared to wild-types and was up-regulated with angiotensin-1 receptor blockade in normotensive rats.

[0061] 21061 is a human channel kinase 1 (CHAK1, LTRPC7 or TRP-PLIK) which belongs to the TRPM (melastatin-like) family. Channel kinases contain a novel alpha kinase (EF2 kinase) domain and 21061 regulates channel activity by autophosphorylation (Runnels 2001 Science 291 1043; Nadler et al., Nature 411 590-595). Based on its annotation, 21061 is likely to function in the action of calcium-mediated cellular responses. Given the well characterized role of calcium signaling in vascular reactivity and the expression pattern of 21061 mRNA, inhibition of 21061 would reduce intracellular calcium levels and promote vasodilation and blood pressure lowering. Due to 21061 mRNA expression in highly vascularized tissues, along with its functional role, modulators of 21061 activity would be useful in treating disorders associated with cardiovascular disease, including but not limited to atherosclerosis. 21061 polypeptides of the present invention are useful in screening for modulators of 21061 activity.

[0062] Gene ID 17662

[0063] The human 17662 sequence (SEQ ID NO:25), known also as vitellogenic carboxypeptidase-like protein (CPVL), is approximately 1638 nucleotides long including untranslated regions. The coding sequence, located at about nucleic acid 70 to 1500 of SEQ ID NO:25, encodes a 476 amino acid protein (SEQ ID NO:26).

[0064] As determined by TaqMan analysis, 17662 mRNA was expressed in a variety of human tissues, primarily in vascularized tissues such as the artery, vein, heart, kidney and skeletal muscle. Additionally, 17662 mRNA was expressed in mononuclear cells, spleen, and erythroid progenitor cells. 17662 mRNA was also significant upregulated in atherosclerotic human arteries compared to contro samples (t-test, p<0.01). In cultured human monocytes and macrophages, 17662 mRNA was robustly expressed. There was also upregulation of 17662 mRNA in failing human ventricles compared to non-failing hearts.

[0065] 17662 is a serine carboxypeptidase known as vitellogenic carboxypeptidase-like protein (CPVL) (Mahoney JA et al., Genomics 2001) which was cloned from human macrophages. 17662 was shown to be induced during maturation of monocytes into macrophages. Our data indicate that overexpression of 17662 mRNA is associated with severity of human vessel disease. A potential role for 17662 includes participation in an inflammatory cascade in coronary artery disease and diminution of atherosclerosis progression. Due to 17662 mRNA expression in vascularized tissues, along with its functional role, modulators of 17662 activity would be useful in treating disorders associated with cardiovascular disease, including but not limited to atherosclerosis. 17662 polypeptides of the present invention are useful in screening for modulators of 17662 activity.

[0066] Gene ID 1468

[0067] The human 1468 sequence (SEQ ID NO:27), known also as Hematopoietic Cell Kinase (HCK), is approximately 2015 nucleotides long including untranslated regions. The coding sequence, located at about nucleic acid 169 to 1686 of SEQ ID NO:27, encodes a 505 amino acid protein (SEQ ID NO:28).

[0068] As determined by TaqMan analysis, 1468 mRNA was expressed in a variety of human tissues, including heart, spleen, tonsil, lung, skeletal muscle and hypothalamus. Additionally, 1468 mRNA was expressed in macrophages, neutrophils, and erythroid progenitor cells. 1468 mRNA was also significantly upregulated in atherosclerotic human arteries compared to normal tissues (t-test, p<0.05). In cultured human monocytes and macrophages, 1468 mRNA was both highly expressed as well as regulated by lipid-loading with oxidized LDL and deloading with apolipoprotein A1. This expression is highly correlated with IL1-beta levels, indicating that the 1468 was regulated in a similar way to an inflammatory marker. In cultured human monocytes and macrophages, the 1468 mRNA was upregulated by 18 hours of CD40 ligand stimulation.

[0069] 1468 is a member of the src family of tyrosine kinases and is referred to as Hematopoietic Cell Kinase (HCK)(Scott, MP, et al., 2002, J Biol Chem, 277: 28238-28246). 1468 has been described as playing a role in phagocytosis and in receptor-mediated signaling in monocytes. Some specific substrates for 1468 include Wiskott-Aldrich syndrome protein (WASP), WASP-interacting protein(WIP)(Scott, MP, et al., 2002, J Biol Chem, 277: 28238-28246), and VAV (English BK et al., 1997, J Leukoc Biol, 62(6):859-64). These substrates are known regulators of the actin cytoskeleton and are activated by inflammatory stimuli. Stimulation of 1468 kinase by sE-selectin promotes monocyte chemotaxis (Kumar, P. et al., 2001, J Biol Chem, 276; 21039-21045). The literature strongly indicates a role for 1468 in monocyte and macrophage activites known to play a deleterious role in blood vessel disease. Therefore, inhibition of 1468 would result in a reduction of monocyte recruitment into atherosclerotic plaques and a diminished lesion size. Due to 1468 mRNA expression in a variety of vascular tissues, along with its functional role, modulators of 1468 activity would be useful in treating disorders associated with cardiovascular disease, including but not limited to atherosclerosis. 1468 polypeptides of the present invention are useful in screening for modulators of 1468 activity.

[0070] Gene ID 12282

[0071] The human 12282 sequence (SEQ ID NO:29), known also as Toll-Like Receptor 8 (TLR8), is approximately 3367 nucleotides long including untranslated regions. The coding sequence, located at about nucleic acid 152 to 3331 of SEQ ID NO:29, encodes a 1059 amino acid protein (SEQ ID NO:30).

[0072] As determined by TaqMan analysis, 12282 mRNA expression was observed in macrophages, PBMC cells, lung, spleen, ovary, synovium and the lymph node. 12282 mRNA was also upregulated in atherosclerotic human arteries relative to normal tissues (t-test, p<0.05). In cultured human monocytes, 12282 mRNA is both highly expressed as well as regulated by lipid-loading with oxidized LDL and deloading with apolipoprotein A1; this expression is highly correlated with IL1-beta levels, suggesting that 12282 is regulated in a similar way to an inflammatory marker. 12282 mRNA was also upregulated in cultured human monocytes and macrophages after 18 hours of interferon gamma stimulation. In the ApoE knockout model, 12282 mRNA was upregulated in aortic arches when compared to the less diseased abdominal aortic segments in 20 and 26 week old animals.

[0073] 12282 is known as Toll-Like Receptor 8 (TLR8). Toll-like receptors are known to mediate innate immunity via the activation of a variety of transcriptional events. TLR8 is unlike many of the earlier characterized TLR's in that it has not previously been shown to be expressed in atherosclerosis. TLR's act on many transcription factors which are known to be induced in inflammation, such as NF-kB, STAT and AP-1 (Lee, JY et al., 2003, J Lipid Res, 44: 479-486). Inhibition of these receptors by n-3 polyunsaturated fatty acids is shown to be beneficial and reduce cyclooxygenase 2 expression (Lee, JY et al., 2003, J Lipid Res, 44: 479486). Therefore, specific regulation of 12282 by oxidized lipids and its expression pattern in diseased vessels, identify 12282 as a new target of inhibition for atherosclerosis. Due to 12282 mRNA expression in human arteries, along with its functional role, modulators of 12282 activity would be useful in treating disorders associated with cardiovascular disease, including but not limited to atherosclerosis. 12282 polypeptides of the present invention are useful in screening for modulators of 12282 activity.

[0074] Gene ID 6350

[0075] The human 6350 sequence (SEQ ID NO:31), known also as carboxypeptidase M, is approximately 2085 nucleotides long including untranslated regions. The coding sequence, located at about nucleic acid 76 to 1407 of SEQ ID NO:31, encodes a 443 amino acid protein (SEQ ID NO:32).

[0076] As determined by TaqMan analysis, 6350 mRNA was expressed in a wide range of human tissues, including primarily kidney, adipose tissue, breast, lung with chronic obstructive pulmonary disease, hemangioma, brain cortex and hypothalamus. Additionally, 6350 mRNA was expressed in arteries and veins. 6350 mRNA was also highly significantly upregulated in atherosclerotic human arteries compared to normal tissues (t-test, p=0.0001). In cultured human monocytes, 6350 was regulated by lipid-loading with oxidized LDL and deloading with apolipoprotein Al. 6350 mRNA was also regulated in both monocytes and macrophages with moderately oxidized and acetylated LDL stimulation. 6350 mRNA was also upregulated in cultured human macrophages after 18 hours of CD40 ligand stimulation.

[0077] 6350 is known as carboxypeptidase M, which is an arginine/lysine carboxypeptidase, that is membrane bound (Skidgel, RA et al., 1989, J Bio Chem, 264: 2236-2241). The enzymatic functions of 6350 include to either i) activate or ii) inactivate peptide hormones, such as anaphylatoxins and enkephalins. One specific substrate of 6350 is bradykinin. The action of carboxypeptidase M on bradykinin causes the formation of des-Arg9-bradykinin, which acts on the B 1 receptor subtype. Stimulation of the B 1 receptor is known to cause inflammatory responses and increased vascular tone. Therefore, inhibition of 6350 would result in a shift of the kinin reaction, toward the build-up of bradykinin, as well as action on the B2 receptor, which promotes vasodilation and nitric oxide formation, both of which can be beneficial in cardiovascular disease. Due to 6350 mRNA upregulation in human arteries, along with its functional role, modulators of 6350 activity would be useful in treating disorders associated with cardiovascular disease, including but not limited to vasodilation. 6350 polypeptides of the present invention are useful in screening for modulators of 6350 activity.

[0078] Gene ID 9035

[0079] The human 9035 sequence (SEQ ID NO:33), known also as CD38, is approximately 1408 nucleotides long including untranslated regions. The coding sequence, located at about nucleic acid 104 to 1006 of SEQ ID NO:33, encodes a 300 amino acid protein (SEQ ID NO:34).

[0080] As determined by TaqMan analysis, 9035 mRNA was expressed in a variety of human tissues, including skeletal muscle, prostate, tonsil, lymph node, spleen, brain cortex and hypothalamus. Additionally, 9035 mRNA was expressed in macrophages and neutrophils. 9035 mRNA was significantly upregulated in atherosclerotic human arteries compared to normal tissues (t-test, p<0.01). In cultured human monocytes, 9035 mRNA was both highly expressed as well as regulated by lipid-loading with oxidized LDL and deloading with apolipoprotein A1. 9035 mRNA was upregulated in cultured human monocytes and macrophages after 18 hours of interferon gamma stimulation. In the ApoE knockout model, 9035 mRNA was dramatically upregulated in aortic arches compared to the less diseased abdominal aortic segments.

[0081] 9035 is known as CD38, which acts as a surface receptor and has enzymatic activity in the conversion of NAD+ to ADP ribose (Deaglio, S et al., 2001, Leuk Res, 25: 1-12). CD38 interacts weakly with its ligand, CD31 on endothelial cells, serving to promote cell-to-cell contact. The end product from the enzymatic reaction mediated by CD38, namely cyclic ADP ribose, is a well known second messenger which causes calcium release (Barone F, et al., 2002, FASEB Journal, 16: 697-705). Intracellular calcium surges result in a range of toxic effects, from activation of calcium dependent enzymes to expression of adhesion molecules. The enzymatic and signaling functions of CD38 are major aspects of the disease process in vessel wall atherosclerosis, from the earliest events of monocyte and lymphocyte adhesion to endothelial cells to the activation of monocytes and macrophages and the generation of toxic inflammatory molecules. Therefore, inhibition of 9035 would result in reduction of monocyte adhesion and extravasation into damaged vascular endothelium and diminished calcium flux in macrophages and monocytes. Due to 9035 mRNA expression in highly vascularized tissues, along with its functional role, modulators of 9035 activity would be useful in treating disorders associated with cardiovascular disease, including but not limited to atherosclerosis. 9035 polypeptides of the present invention are useful in screening for modulators of 9035 activity.

[0082] Gene ID 1820

[0083] The human 1820 sequence (SEQ ID NO:35), known also as mast cell chymase, is approximately 769 nucleotides long including untranslated regions. The coding sequence, located at about nucleic acid 16 to 759 of SEQ ID NO:35, encodes a 247 amino acid protein (SEQ ID NO:36).

[0084] As determined by TaqMan analysis, 1820 mRNA was expressed at highest levels in brain, in mast cells and in megakaryocytes generated in vitro. 1820 mRNA was detected in the platelets of patients with coronary artery disease and in platelets from normal volunteers.

[0085] Mast cell chymase has not been previously identified as a megakaryocyte/platelet product. The high levels of 1820 mRNA found in megakaryocytes and platelets indicate that 1820, a soluble granule protein, regulates clot formation following platelet degranulation. Therefore, inhibition of 1820 would provide a means to regulate platelet-rich thrombus formation Due to 1820 mRNA expression in the platelets of patients with coronary artery disease, along with its functional role, modulators of 1820 activity would be useful in treating disorders associated with cardiovascular disease, including but not limited to thrombosis. 1820 polypeptides of the present invention are useful in screening for modulators of 1820 activity.

[0086] Gene ID 23652

[0087] The human 23652 sequence (SEQ ID NO:37), known also as N-acetyltransferase-6 (NAT-6), is approximately 1272 nucleotides long including untranslated regions. The coding sequence, located at about nucleic acid 212 to 1072 of SEQ ID NO:37, encodes a 286 amino acid protein (SEQ ID NO:38).

[0088] As determined by TaqMan analysis, 23652 mRNA was expressed at high levels in the brain, megakaryocytes generated in vitro, and in endothelial cell cultures. 23652 mRNA was also expressed, but at lower levels in kidney and heart. 23652 mRNA was detected in the platelets of patients with coronary artery disease and in platelets from normal volunteers.

[0089] N-acetyltransferase 1 and 2 are implicated in lung cancer, however the function of NAT-6 or 23652 has not previously been ascertained. The high levels of 23652 mRNA found in megakaryocytes and platelets indicate that 23652 plays a role in post-translational modification of granule protein(s). Therefore, inhibition of 23652 would provide a means to inhibit platelet-granule mediated thrombus formation. Due to 23652 mRNA expression in platelets of patients with coronary artery disease, along with its functional role, modulators of 23652 activity would be useful in treating disorders associated with cardiovascular disease, including but not limited to thrombosis. 23652 polypeptides of the present invention are useful in screening for modulators of 23652 activity.

[0090] Gene ID 7301

[0091] The human 7301 sequence (SEQ ID NO:39), known also as Adomet synthetase, is approximately 3386 nucleotides long including untranslated regions. The coding sequence, located at about nucleic acid 223 to 1410 of SEQ ID NO:39, encodes a 395 amino acid protein (SEQ ID NO:40).

[0092] As determined by TaqMan analysis, 7301 mRNA was down-reregulated in the livers of marmosets treated with lipid-lowering therapies such as niacin, probucol, fenofibrate, gemfibrozil, and cerivastatin. 7301 mRNA was also down-regulated in the livers of mice during treatment with ciprofibrate.

[0093] 7301 is Adomet synthetase, a protein that converts methionine and adenosine to Adomet. A reduction in 7301 and an increase in other known genes by lipid-lowering therapies cause a reduction in the levels of Adomet in the liver. Adomet is a metabolic sensor in the liver, thereby causing levels of Adomet signaling in the liver to either move towards a metabolic state or towards a repair state. When in the repair state, such as after liver injury by hepatectomy, the liver reduces the secretion of very low density lipoprotein (VLDL) particles. Therefore, the partial inhibition of 7301 would orient the liver towards a repair mode and would result in decrease of VLDL secretion. This would be beneficial for the treatment of hyperlipidemia and atherosclerosis. Due to 7301 mRNA expression in various lipid models, along with its functional role, modulators of 7301 activity would be useful in treating disorders associated with cardiovascular disease, including but not limited to atherosclerosis. 7301 polypeptides of the present invention are useful in screening for modulators of 7301 activity.

[0094] Gene ID 8925

[0095] The human 8925 sequence (SEQ ID NO:41), known also as Aldehyde oxidase (AO) (EC 1.2.3.1), is approximately 4170 nucleotides long including untranslated regions. The coding sequence, located at about nucleic acid 101 to 4117 of SEQ ID NO:41, encodes a 1338 amino acid protein (SEQ ID NO:42).

[0096] As determined by TaqMan analysis, 8925 mRNA was upregulated in the livers of marmosets treated with lipid-lowering therapies such as niacin, cholestyramine, and cerivastatin. 8925 mRNA was expressed only in the liver and adrenal glands of over 40 tissues and cells tested.

[0097] 8925 is Aldehyde oxidase (AO) which belongs to the family molybdo-flavoenzymes (MFEs) that includes xanthine oxidase and recently the identified mouse aldehyde oxidase homologs 1, 2 and 3. Molybdenum acts as a biologically active cofactor (MoCo). 8925 or AO oxidizes aromatic aza-heterocycles containing a —CH═N— chemical function (phthalazine and purines), aromatic or non-aromatic charged aza-heterocycles (N1-methylnicotinamide and N-methylphtalazinium) or aldehydes such as benzaldehyde, retinal and vanillin. Given the upregulation of AO by lipid-lowering therapies, 8925 or AO potentially plays a role in the generation of a compound that stimulates VLDL synthesis. For example, AO can convert retinal to retinoic acid which is a ligand for nuclear hormone receptors such as RXR and RAR. These receptors form heterodimers with other nuclear hormone receptors such as LXR and PXR. The heterodimers that are formed can regulate the expression of genes involved in lipid synthesis and metabolism. Therefore, an inhibitor of 8925 will reduce the level of a lipid-related nuclear hormone in the liver and affect the expression of lipid-synthesis genes. Due to 8925 mRNA expression in various models of lipid metabolism, along with its functional role, modulators of 8925 activity would be useful in treating disorders associated with cardiovascular disease, including but not limited to atherosclerosis. 8925 polypeptides of the present invention are useful in screening for modulators of 8925 activity.

[0098] Gene ID 8701

[0099] The human 8701 sequence (SEQ ID NO:43), known also as alcohol dehydrogenase (ADHFe1), is approximately 1981 nucleotides long including untranslated regions. The coding sequence, located at about nucleic acid 15 to 1418 of SEQ ID NO:43, encodes a 467 amino acid protein (SEQ ID NO:44).

[0100] As determined by TaqMan analysis, 8701 mRNA was upregulated in the livers of marmosets treated with lipid-lowering therapies such as an MTP inhibitor, cholestyramine, gemfibrozil, fenofibrate, and cerivastatin.

[0101] 8701 is an alcohol dehydrogenase (ADHFe1) which causes a reversible oxidation of alcohols to aldehydes or ketones using NAD(P) as a cofactor. It is well established that moderate alcohol intake increases HDL cholesterol and plasma ApoAI (e.g. J Lipid Res 2001, 42:2077-83: Alcohol Clin Exp Res 2002, 26: 1430-5). It has been shown that moderate drinkers who are homozygous for a slow-oxidizing form of another alcohol dehydrogenase (ADH3) have higher HDL levels and a substantially decreased risk of myocardial infarction (N Engl J Med 2001, 344:549-555). The mechanism by which this protection occurs is unknown. Because 8701 is highly regulated by lipid-lowering therapies, inhibition of 8701 should increase HDL, decrease LDL, and be protective for atherosclerosis. Due to 8701 mRNA expression in various models of lipid metabolism, along with its functional role, modulators of 8701 activity would be useful in treating disorders associated with cardiovascular disease, including but not limited to atherosclerosis. 8701 polypeptides of the present invention are useful in screening for modulators of 8701 activity.

[0102] Gene ID 3533

[0103] The human 3533 sequence (SEQ ID NO:45), known also as a serine protease or human reelin (RELN) (EC 3.4.21), is approximately 11580 nucleotides long including untranslated regions. The coding sequence, located at about nucleic acid 176 to 10558 of SEQ ID NO:45, encodes a 3460 amino acid protein (SEQ ID NO:46).

[0104] As determined by TaqMan analysis using a human tissue panel, 3533 mRNA was highly expressed in the dorsal root ganglion, spinal cord, brain, and liver out of over 40 tissues and cells tested. 3533 mRNA was significantly downregulated by many lipid lowering drugs including niacin, cholestyramine and statins. 3533 mRNA was also downregulated by T3 and variable regulation of 3533 was observed by fibrates.

[0105] Reelin or 3533 is a large secreted molecule with an active serine protease and it has been shown to be important in neuronal guidance in the developing nervous system. Reelin plays a role in layering of neurons in the cerebral cortex and cerebellum, it regulates microtubule function in neurons and neuronal migration and it affects migration of sympathetic preganglionic neurons in the spinal cord, where it seems to act as a barrier to neuronal migration. Binding to the extracellular domains of lipoprotein receptors VLDLR and ApoER2 induces tyrosine phosphorylation of Dab1 and modulation of Tau phosphorylation. Reelin can signal through the VLDL receptor and the ApoE2 receptor and can be found circulating in the plasma. 3533 is potentially associated with VLDL and LDL and during this association the protease activity of 3533 serves to degrade the ECM and allow transvessel migration of LDL and VLDL. Once associated within an artery wall, 3533 continues to degrade the ECM and destabilize a developing plaque. Threfore, inhibition of 3533 will reduce the size of atherosclerotic plaques and will increase the stability of already formed plaques. This combination of effects will reduce the number of coronary events. Due to 3533 mRNA expression in the dorsal root ganglion, spinal cord, brain, and liver, along with its functional role, modulators of 3533 activity would be useful in treating disorders associated with cardiovascular disease, including but not limited to atherosclerosis. 3533 polypeptides of the present invention are useful in screening for modulators of 3533 activity.

[0106] Gene ID 9462

[0107] The human 9462 sequence (SEQ ID NO:47), known also as microsomal epoxide hydrolase, is approximately 1742 nucleotides long including untranslated regions. The coding sequence, located at about nucleic acid 163 to 1530 of SEQ ID NO:47, encodes a 455 amino acid protein (SEQ ID NO:48).

[0108] As determined by TaqMan analysis, 9462 mRNA was upregulated by an MTP inhibitor, cholestyramine, niacin, fibrates, and statins. 9462 mRNA was also expressed in adrenal, liver, ovary, and the CNS.

[0109] 9462 is microsomal epoxide hydrolase. Epoxides are three-membered rings from enzymatic (e.g. P450 monooxygenase system) or chemical oxidative metabolism of endogenous and xenobiotic compounds. Epoxides are usually unstable in aqueous environments and are chemically reactive. Some epoxides are carcinogenic initiators. Epoxide hydrolases convert epoxides to dihydrodiol products. Microsomal epoxide hydrolase catalyzes the hydrolysis of a wide variety of aliphatic and arene oxides to trans-dihydrodiols and is found in the ER and nuclear envelope where it is associated with cytochrome P-450 mixed function oxidase system. Oxysterols, which are regulators of lipid metabolism, are degraded by the P-450 system. Oxysterols serve to reduce the levels of cholesterol synthetic enzymes. Therefore, 9462 is involved in the metabolism of oxysterols and inhibiton of this enzyme will increase oxysterol levels and reduce cholesterol synthesis. This will reduce serum cholesterol levels and have a protective effect on coronary artery disease. Due to 9462 mRNA expression in the adrenal, liver, ovary, and the CNS, along with its functional role, modulators of 9462 activity would be useful in treating disorders associated with cardiovascular disease, including but not limited to atherosclerosis. 9462 polypeptides of the present invention are useful in screening for modulators of 9462 activity.

[0110] Gene ID 9123

[0111] The human 9123 sequence (SEQ ID NO:49), known also as Adomet decarboxylase, is approximately 1805 nucleotides long including untranslated regions. The coding sequence, located at about nucleic acid 249 to 1253 of SEQ ID NO:49, encodes a 334 amino acid protein (SEQ ID NO:50).

[0112] As determined by TaqMan analysis, 9123 mRNA was upregulated in the livers of marmosets treated with lipid-lowering therapies such as niacin, probucol, fenofibrate, gemfibrozil, and cerivastatin. 9123 mRNA was also upregulated in the livers of mice during treatment with ciprofibrate.

[0113] 9123 is Adomet decarboxylase. The combination of a reduction of Adomet synthetase and an increase in 9123 by lipid-lowering therapies should cause a reduction in the levels of Adomet in the liver. Adomet is a metabolic sensor in the liver and levels of Adomet signal the liver to either move towards a metabolic state or towards a repair state. When in the repair state, such as after liver injury by hepatectomy, the liver reduces the secretion of very low density lipoprotein (VLDL) particles. Therefore, partial inhibition of 9123 would orient the liver towards a repair mode and would therefore result in decrease of VLDL secretion. This would be beneficial for the treatment of hyperlipidemia and atherosclerosis. Due to 9123 mRNA expression in various models of lipid metabolism, along with its functional role, modulators of 9123 activity would be useful in treating disorders associated with cardiovascular disease, including but not limited to atherosclerosis. 9123 polypeptides of the present invention are useful in screening for modulators of 9123 activity.

[0114] Gene ID 12788

[0115] The human 12788 sequence (SEQ ID NO:51), known also as a phospholipase (PLC-beta-4), is approximately 3707 nucleotides long including untranslated regions. The coding sequence, located at about nucleic acid 231 to 3299 of SEQ ID NO:51, encodes a 1022 amino acid protein (SEQ ID NO:52).

[0116] As determined by TaqMan analysis, 12788 mRNA was highly expressed in human arteries, veins, failing hearts, colon tumors, prostate tumors, brain cortex and hypothalamus. Further TaqMan analysis indicated that 12788 mRNA demonstrated robust upregulation across human heart failure samples when compared to non-failing ventricles. In rat models, 12788 mRNA was moderately expressed in aortas. In spontaneously hypertensive-stroke prone rat models, 12788 mRNA was upregulated when compared to Wistar Kyoto normotensive controls in 15 week old animals. In addition, 12788 mRNA was upregulated in aortas from rats treated for 3 days with two anti-hypertensive agents, an AT1-receptor blocker and an L-type calcium channel blocker.

[0117] 12788 is a phospholipase known as PLC-beta-4. 12788 is a member of a family of PLC's that act through G-protein dependent pathways and is expressed in vascular smooth muscle cells (BR J Pharmacol 1996 June; 118:1003-1011). Phospholipase C catalyzes hydrolysis of phosphatidylinositol 4,5-bisphosphate which generates two second messengers, namely 1,4,5-inositol trisphosphate (IP3) and 1,2 diacylglycerol (DAG). These products are known to modulate intracellular calcium flux and activate protein kinase C. This consequently causes vasoconstriction in vascular smooth muscle cells, leading to an enhancement of vascular tone. Therefore, inhibition of 12788 prevents the formation of 1P3 and DAG and promotes vasorelaxation. In addition, antagoning 12788 in heart disease is likely to benefit similar mechanisms, including a reduction in calcium elevation in the failing myocyte. Due to 12788 mRNA expression in human vasculature, along with its functional role, modulators of 12788 activity would be useful in treating disorders associated with cardiovascular disease, including but not limited to heart failure. 12788 polypeptides of the present invention are useful in screening for modulators of 12788 activity.

[0118] Gene ID 17729

[0119] The human 17729 sequence (SEQ ID NO:53), known also as ERG4/ERG24, is approximately 1443 nucleotides long including untranslated regions. The coding sequence, located at about nucleic acid 127 to 1383 of SEQ ID NO:53, encodes a 418 amino acid protein (SEQ ID NO:54).

[0120] As determined by TaqMan analysis, 17729 mRNA was expressed in the pancreas, brain cortex, CHF heart, prostate tumor and fibrotic liver. 17729 mRNA was upregulated by cholestyramine, fibrates, and cerivastatin in marmoset models. Further TaqMan analysis indicated that 17729 mRNA was downregulated by cholesterol feeding in the ApoE knockout mouse models.

[0121] 17729 is a member of the ERG4/ERG24 family of proteins. 17729 is an integral membrane protein in the endoplasmic reticulum. 17729 is the product of the human TM7SF2 gene. It has been called sterol reductase 1 (SR-1). Expression of SR-1 in yeast yielded no sterol delta-14-, delta-7- or delta-24-reducatase activities (Biochim. Biophys. Acta 2000, 1529:340-356). A 38 kDa protein from bovine liver with similarity to human SR-1 (92% similarity) had functional delta-14-reductase activity (Eur. J. Biochem. 2002, 269:283-290).

[0122] The upregulation of 17729 mRNA by lipid-lowering therapies and its downregulation by cholesterol suggests that 17729 is involved in cholesterol synthesis. Although no delta-14-reductase activity has been detected for human SR-1, we suggest that SR-1 is indeed involved in cholesterol synthesis and that it is a functional sterol reductase of undetermined activity. Due to 17729 mRNA upregulation in various models of heart failure, along with its functional role, modulators of 17729 activity would be useful in treating disorders associated with cardiovascular disease, including but not limited to heart failure. 17729 polypeptides of the present invention are useful in screening for modulators of 17729 activity.

[0123] Gene ID 65552

[0124] The human 65552 sequence (SEQ ID NO:55), known also as metalloprotease disintegrin 15 (ADAMTS15), is approximately 2853 nucleotides long. The coding sequence, located at about nucleic acid 1 to 2853 of SEQ ID NO:55, encodes a 950 amino acid protein (SEQ ID NO:56).

[0125] As determined by TaqMan analysis, 65552 mRNA was expressed in a variety of human tissues, including artery, heart, kidney, skeletal muscle, adipose and breast. Additionally, 65552 mRNA expression was dramatically biased in its vessel expression profile to arteries over veins.

[0126] 65552 is a metalloprotease disintegrin 15, ADAMTS15 (Cal, S.; Obaya, A. J.; Llamazares, M.; Garabaya, C.; Quesada, V.; Lopez-Otin, C.: Cloning, expression analysis, and structural characterization of seven novel human ADAMTSs, a family of metalloproteinases with disintegrin and thrombospondin-1 domains. Gene 283: 49-62, 2002.) The metalloproteinases (MPs) are a class of molecules which includes the recently discovered ADAMs (a disintegrin and metalloproteinase domain) and ADAMTS (a disintegrin and metalloproteinase thrombospondin) families. Metalloproteinases are key mediators of extracellular matrix degradation. The well described role of MPs in cardiovascular disease, coupled with the expression profile and enrichment in arteries, suggest that inhibition of 65552 would result in a protection against vascular injury and atherosclerosis by reducing matrix breakdown. Due to 65552 mRNA expression along with its functional role, modulators of 65552 activity would be useful in treating disorders associated with cardiovascular disease, including but not limited to atherosclerosis. 65552 polypeptides of the present invention are useful in screening for modulators of 65552 activity.

[0127] Gene ID 1261

[0128] The human 1261 sequence (SEQ ID NO:57), known also as NR41_HUMAN Orphan nuclear receptor HMR, is approximately 2481 nucleotides long including untranslated regions. The coding sequence, located at about nucleic acid 110 to 1906 of SEQ ID NO:57, encodes a 598 amino acid protein (SEQ ID NO:58).

[0129] As determined by TaqMan analysis, 1261 mRNA showed very high expression in large arteries and aorta, with lower but significant expression in diseased specimens. Expression of 1261 mRNA was much lower in hemangioma samples consisting largely of angiogenic endothelial cells. Further TaqMan experiments indicated that 1261 mRNA was upregulated by laminar shear stress and by vascular endothelial growth factor (VEGF) individually, and synergistically upregulated when treated with laminar shear stress followed by 3 hours of VEGF treatment. In addition, a timecourse study of 1261 mRNA expression showed strong upregulation at 1 hour of VEGF treatment in statically cultured or shear-stressed cells treated with VEGF, while upregulation was more persistent in shear-stressed cells.

[0130] The cell regulation and tissue expression data indicate that 1261 mRNA expression is correlated with vessel stability. High expression of 1261 is related to resistance to the angiogenic effects of VEGF as measured in the tube formation assay. In the shear stress +VEGF experiments, the well-characterized anti-angiogenic factor Meth-1 was regulated similarly to 1261. Reduced expression of 1261 in diseased and angiogenic vessels compared to healthy stable vessels is consistent with this hypothesis. The transient upregulation of 1261 in response to VEGF, TNF-α, IL-1β, and serum addition, conditions mimicking angiogenic/inflammatory stimuli, indicates that 1261 is involved in immediate responses to counter angiogenic stimulation. Therefore, an antagonist of 1261 is useful for inducing therapeutic angiogenesis. Due to 1261 mRNA expression in a variety of vascular tissues, along with its functional role, modulators of 1261 activity would be useful in treating disorders associated with cardiovascular disease, including but not limited to atherosclerosis. 1261 polypeptides of the present invention are useful in screening for modulators of 1261 activity.

[0131] Gene ID 21476

[0132] The human 21476 sequence (SEQ ID NO:59), known also as galactoside 2-alpha-L-fucosyltransferase 2 (EC 2.4.1.69) (GDP-L-fucose:beta-D-galactoside 2-alpha-L-fucosyltransferase 2) (Alpha(1,2)FT 2) (Fucosyltransferase 2) (Secretor blood group alpha-2-fucosyltransferase), is approximately 1071 nucleotides long including untranslated regions. The coding sequence, located at about nucleic acid 106 to 918 of SEQ ID NO:59, encodes a 270 amino acid protein (SEQ ID NO:60).

[0133] As determined by TaqMan analysis, 21476 mRNA was highly expressed in arteries, HUVEC cells, kidney, ovary, and liver fibrosis tissues. 21476 mRNA was upregulated in confluent endothelial cells from multiple tissue sources compared to proliferating controls. Serum starvation of confluent cells further increased 21476 mRNA expression.

[0134] 21476, also known as galactoside 2-alpha-L-fucosyltransferase 2, is known to be expressed specifically in cells of endodermal origin. One possible interpretation of 21476 function is that lowering its expression in actively proliferating cells leads to an increase in proliferation. However, several other genes with this pattern of regulation in cells have been shown to be upregulated in angiogenic vessels in vivo, suggesting that the opposite interpretation is also possible. Therefore, antagonists of 21476 may either promote or inhibit angiogenesis. Due to 21476 mRNA expression in a variety of vascular tissues, along with its functional role, modulators of 21476 activity would be useful in treating disorders associated with cardiovascular disease, including but not limited to atherosclerosis. 21476 polypeptides of the present invention are useful in screening for modulators of 21476 activity.

[0135] Gene ID 33770

[0136] The human 33770 sequence (SEQ ID NO:61), known also as Aldehyde dehydrogenase 8 A1 and ALDH12, is approximately 2156 nucleotides long including untranslated regions. The coding sequence, located at about nucleic acid 39 to 1502 of SEQ ID NO:61, encodes a 487 amino acid protein (SEQ ID NO:62).

[0137] As determined by TaqMan analysis, 33770 mRNA expression was at highest levels in the liver, followed by kidney and brain tissues. 33770 mRNA was also downregulated by ciprofibrate (0.76 fold, p=0.02) in the livers of mice.

[0138] 33770 is known as Aldehyde dehydrogenase 8 A1 and ALDH12. 33770 is 43-47% identical at the nucleic acid level to other aldehyde dehydrogenases (ALDH1, 3, 6, and 9) (J Biol Chem 2000, 275:40106-12). 33770 is known to convert retinal to retinoic acid and is the only aldehyde dehydrogenase known to have some specificity for 9-cis retinal over all-trans retinal. Retinoic acids (specifically 13-cis retinoic acid and 9-cis retinoic acid) are known to increase total cholesterol, ILDL-cholesterol, apoB and triglyceride levels and decrease HDL-cholesterol in humans. This unfavorable lipid profile increases the risk of developing atherosclerosis and coronary artery disease. Our data indicate that 33770 mRNA is highly expressed in liver and is downregulated in ciprofibrate in the liver. This data is consistent with a role for 33770 in generating retinoic acid which is known to yield an unfavorable lipid profile. Therefore blocking the synthesis of retinoic acid through the use of 33770 inhibitors may result in a more favorable lipid profile in humans leading to a reduction in coronary artery disease. Due to 33770 mRNA expression in human lipids, along with its functional role, modulators of 33770 activity would be useful in treating disorders associated with cardiovascular disease, including but not limited to heart failure and coronary artery disease. 33770 polypeptides of the present invention are useful in screening for modulators of 3370 activity.

[0139] Gene ID 9380

[0140] The human 9380 sequence (SEQ ID NO:63), known also as homogentisate 1,2 dioxygenase (HGD), is approximately 1712 nucleotides long including untranslated regions. The coding sequence, located at about nucleic acid 168 to 1505 of SEQ ID NO:63, encodes a 445 amino acid protein (SEQ ID NO:64).

[0141] As determined by TaqMan analysis, 9380 mRNA expression was downregulated in the livers of mice treated with ciprofibrate and downregulated in the ApoE knockout mice on a high cholesterol diet. 9380 mRNA was upregulated in the livers of marmosets treated with microsomal triglyceride transfer protein (MTP) inhibitor, cholestyramine, niacin and probucol.

[0142] 9380 is homogentisate 1,2 dioxygenase (HGD), a protein involved in tyrosine and phenylalanine degradation that converts homogentisic acid to maleylacetoacetic acid. The endpoint of tyrosine degradation is production of fumarate and acetoacetate. Fumarate then enters the tricarboxylic acid cycle (TCA cycle) for ATP production. Acetoacetate is one of the main ketone bodies synthesized by the liver; ketone bodies are lipid-based energy-yielding molecules that are converted to acetoacetyl CoA in non-liver tissues such as cardiac and skeletal muscle to produce acetyl CoA which in turn enters the TCA cycle to eventually produce ATP. In the liver, acetyl CoA can be converted to HMG CoA to either enter the cholesterol synthesis or the ketone bodies synthesis pathway. Therefore, inhibition of 9380 would decrease the levels of fumarate and acetoacetate in the liver. This inhibition would have an effect on 2 levels. Firstly, less fumarate would enter the TCA cycle reducing ATP production therefore increasing the need for energy. Secondly, a reduction in acetoacetate would result in a decrease in ketone bodies availability for peripheral tissues, a reduction of energy metabolism and therefore an increase in energy demand. Overall, the acetyl CoA that is also required for cholesterol synthesis will be mostly redirected towards the TCA cycle to compensate for a reduction in energy metabolism resulting in a decrease in cholesterol synthesis. Due to 9380 mRNA upregulation in various models of heart failure, along with its functional role, modulators of 9380 activity would be useful in treating disorders associated with cardiovascular disease, including but not limited to hyperlipidemia. 9380 polypeptides of the present invention are useful in screening for modulators of 9380 activity.

[0143] Gene ID 2569654

[0144] The human 2569654 sequence (SEQ ID NO:65), known also as Betaine-Homocysteine Methyltransferase (BHMT) (E.C. 2.1.1.5), is approximately 2420 nucleotides long including untranslated regions. The coding sequence, located at about nucleic acid 27 to 1247 of SEQ ID NO:65, encodes a 406 amino acid protein (SEQ ID NO:66).

[0145] As determined by TaqMan analysis, 2569654 mRNA was significantly downregulated in the livers of ApoE knock out (KO) mice with cholesterol feeding and in mice treated with Ciprofibrate. 2569654 is also downregulated in the livers of LDLR knock out mice fed on a high-fat diet. 2569654 mRNA was also upregulated with T3, Niacin and Cholestyramine treatment in marmoset models.

[0146] 2569654 or BHMT catalyzes the synthesis of methionine by re-methylating homocysteine using betaine (trimethylglycine) as the methyl donor. In the rat hepatoma cell line, McArdle RH-7777, ApoB mRNA expression is increased significantly with increasing BHMT protein expression (Sowden et al, Biochem. J. (1999) 341: 639-645). In the cell line secreting the highest level of BHMT protein, ApoB lipoprotein secretion was increased. ApoB 48 expression was increased to a greater extent than the increase observed in ApoB 100 expression. Message levels for other apolipoproteins was unaffected by BH expression. In thyroidectomized chickens, overexpression of a 45 KDa protein was observed and later identified as BHMT (Shibata et al, Poult Sci (2003) 82(2):207-213). Expression of BHMT in the liver of the thyroidectomized chickens corresponds to an increase in plasma phospholipid, triglyceride and total cholesterol levels. These data indicate that an increased expression of BHMT increases expression of ApoB mRNA as well as secretion of ApoB lipoprotein. Furthermore, Cholesterol feeding significantly decreased the expression of BHMT in ApoE deficient mice indicating that high levels of cholesterol suppress expression of BHMT in a feedback manner. Ciprofibrate treatment in mice, a therapy used in humans to lower plasma lipids, also downregulates BHMT expression. Our data indictes that the downregulation of BHMT is part of the mechanism of protection by fibrates. Therefore, the inhibition of BHMT leads to the reduction of ApoB, cholesterol and triglyceride levels and could be an effective treatment for hyperlipidemia. Due to 2569654 mRNA expression in highly vascularized tissues, along with its functional role, modulators of 2569654 activity would be useful in treating disorders associated with cardiovascular disease, including but not limited to hyperlipidemia. 2569654 polypeptides of the present invention are useful in screening for modulators of 2569654 activity.

[0147] Gene ID 33556

[0148] The human 33556 sequence (SEQ ID NO:67), known also as peptide/histidine transporter 2 (PHT2), is approximately 2057 nucleotides long including untranslated regions. The coding sequence, located at about nucleic acid 133 to 1878 of SEQ ID NO:67, encodes a 581 amino acid protein (SEQ ID NO:68).

[0149] As determined by TaqMan analysis, 33556 mRNA was expressed in a variety of human tissues, mainly vascularized tissues such as artery, vein, heart, kidney and skeletal muscle. Additionally, 33556 mRNA was highly expressed in macrophages, spleen, and human umbilical vein endothelial cells. 33556 mRNA was also significantly upregulated in atherosclerotic human arteries compared to normal arteries (t-test, p<0.001). In cultured human monocytes and macrophages, 33556 mRNA was robustly expressed and was upregulated at 18h of CD401 and interferon gamma stimulation in macrophages. There was dramatic upregulation of 33556 in ApoE−/−aortic arches when compared to abdominal aortas beginning at 12 weeks of age and continuing through the age of 35 weeks.

[0150] 33556 is known as peptide/histidine transporter 2 (PHT2) (Herrera-Ruiz, D and Knipp, GT, Journal of Pharmaceutical Sciences, 2003, 92; 691-714). 33556 function has been shown to relate to the transport of dipeptides, with high affinity to histidine. Histidine is converted to histamine by the enzyme histidine decarboxylase. Histadine decarboxlase and its product, histamine, are thought to be causally related to the progression of human atherosclerosis (Higuchi, S, et al, FEBS Letters, 2001, 505: 217-222). Therefore, blocking 33556 would prevent histidine transport into the cytoplasm and would result in a decreased production of histamine. This would result in a decrease in the initiation and degree of atherosclerosis. Due to 33556 mRNA expression in human vasculature, along with its functional role, modulators of 33556 activity would be useful in treating disorders associated with cardiovascular disease, including but not limited to atherosclerosis. 33556 polypeptides of the present invention are useful in screening for modulators of 33556 activity.

[0151] Gene ID 53656

[0152] The human 53656 sequence (SEQ ID NO:69), known also as an organic anion transporting polypeptide (OATP8) or Liver-specific organic anion transporter 2 LST-2, is approximately 2109 nucleotides long. The coding sequence, located at about nucleic acid 1 to 2109 of SEQ ID NO:69, encodes a 702 amino acid protein (SEQ ID NO:70).

[0153] As assessed by TaqMan analysis, 53656 mRNA was downregulated in the livers of African Green Monkeys (1.3 fold). 53656 mRNA was also upregulated by cerivastatin (1.4 fold), cholestyramine, (1.8 fold), niacin (1.4 fold), and the combination therapy of cerivastatin and fenofibrate (2.0 fold) in the livers of Marmosets. In an organ recital model of 40 tissues and cells, 53656 mRNA was found to be highly selective for colon tumor, liver, and liver fibrosis.

[0154] Organic Anion Transporting Polypeptides (OATPs) are located on the basolateral (sinusoidal) domain in hepatocytes. They play a role in the removal of organic anions from the circulation (e.g. bile salts [in concert with Na-taurocholate transporters], drugs, some peptide hormones). Each has a unique tissue expression and there is some specificity overlap. Some transporters have unique ligands. Of all the known ligands for OATP8, the only one unique to OATP8 is cholesystkinin-8 (CCK-8). CCK-8 is known to play a role in decreasing gastric emptying (causing appetite suppresion). It also plays a role in increasing gallbladder emptying and exocrine pancreatic secretion. CCK-8 causes a 53% reduction of triacylglycerol secretion in isolated hepatocytes via the CCK-B receptor (Hepatology, 1993, 18:1232-7) and OATP8 selectively removes CCK-8 which leads to its degradation (Hepatology, 1990, 12:301-5).

[0155] Inhibition of 53656 or OATP8 leads to increased levels of CCK-8 which decreases triglcyeride secretion by hepatocytes. Increased CCK-8 also increases gall bladder emptying leading to increased bile acid synthesis and reduced liver cholesterol levels. Together this potentially results in a decrease in plasma cholesterol and triglycerides. Due to 53656 mRNA expression in the liver, along with its functional role, modulators of 53656 activity would be useful in treating disorders associated with cardiovascular disease including but not limited to heart failure. 53656 polypeptides of the present invention are useful in screening for modulators of 53656 activity.

[0156] Gene ID 44143

[0157] The human 44143 sequence (SEQ ID NO:71), known also as Cdc-42 binding kinase beta/MRCK beta, is approximately 6780 nucleotides long including untranslated regions. The coding sequence, located at about nucleic acid 290 to 5425 of SEQ ID NO:71, encodes a 1711 amino acid protein (SEQ ID NO:72).

[0158] As determined by TaqMan analysis, 44143 mRNA was expressed predominantly in vascular tissues such as artery, heart, bladder, kidney and in brain cortex. Additionally, 44143 mRNA was expressed in cultured smooth muscle cells and in human umbilical vein endothelial cells. In rats treated with minoxidil or an angiotensin receptor blocker (antihypertensive agents) for twenty eight days, expression of 44143 mRNA was upregulated in aortas compared to vehicle treated controls. In spontaneously hypertensive (SHR) rats, there was upregulation of 44143 mRNA in aortas of the SHR and stroke-prone strains at 15 weeks of age compared to Wistar-Kyoto normotensive age-matched controls.

[0159] 44143 is known as Cdc-42 binding kinase beta or myotonic dystrophy related kinase beta (MRCKbeta). 44143 is a downstream signaling molecule for the small Rho-like GTPase, Cdc42. Cdc42 is a member of a family of two kinases which effect actin and myosin reorganization (Leung, T et al., Myotonic dystrophy kinase-related Cdc42-binding kinase acts as a Cdc42 effector in promoting cytoskeletal reorganization, 1998, Molecular and Cellular Biology, 18: 130-140). In vitro, the MRCKalpha is shown to phosphorylate myosin light chain, which is known to cause vascular contraction. Therefore, 44143 will have a similar effect as MRCK alpha on the vasculature, hence the inhibition of 44143 will result in vasorelaxation. Due to 44143 mRNA expression in human vasculature, along with its functional role, modulators of 44143 activity would be useful in treating disorders associated with cardiovascular disease including but not limited to vasorelaxation. 44143 polypeptides of the present invention are useful in screening for modulators of 44143 activity.

[0160] Gene ID 32612

[0161] The human 32612 sequence (SEQ ID NO:73), known also as peptide/histidine transporter 1 (PHT1), is approximately 2699 nucleotides long including untranslated regions. The coding sequence, located at about nucleic acid 181 to 1671 of SEQ ID NO:73, encodes a 496 amino acid protein (SEQ ID NO:74).

[0162] As determined by TaqMan analysis, 32612 mRNA was expressed in a variety vascularized tissues such as artery, vein, heart, kidney, skeletal muscle and central nervous system (CNS) structures, such as brain cortex and hypothalamus. Additionally, 32612 mRNA was highly expressed in various cell types, specifically smooth muscle cells, epithelial cells, glial cells and endothelial cells. 32612 mRNA was also upregulated (t-test, p<0.05) in diseased human arteries when compared to normal human arteries.

[0163] 32612 is known as peptide/histidine transporter 1 (PHT1) (Herrera-Ruiz, D and Knipp, G T, Journal of Pharmaceutical Sciences, 2003, 92; 691-714). The function of 32612 has been shown to relate to the transport of dipeptides and with high affinity to histidine. Histidine is converted to histamine by the enzyme histidine decarboxylase. Histadine decarboxylase and its product, histamine, are thought to be causally related to the progression of human atherosclerosis (Higuchi, S, et al, FEBS Letters, 2001, 505: 217-222). Therefore, blocking the 32612 or PHT1 would prevent histidine transport into the cytoplasm and would result in a decreased production of histamine. This would result in a decrease in the initiation and degree of atherosclerosis. Due to 32612 mRNA expression in human vasculature, along with its functional role, modulators of 32612 activity would be useful in treating disorders associated with cardiovascular disease including but not limited to atherosclerosis. 32612 polypeptides of the present invention are useful in screening for modulators of 32612 activity.

[0164] Gene ID 10671

[0165] The human 10671 sequence (SEQ ID NO:75), known also as tryptophan 5-monooxygenase (TPH), is approximately 1335 nucleotides long. The coding sequence, located at about nucleic acid 1 to 1335 of SEQ ID NO:75, encodes a 444 amino acid protein (SEQ ID NO:76).

[0166] As determined by TaqMan analysis, 10671 mRNA expression was found to be limited to a small number of human tissues. 10671 mRNA was found to be restricted to arteries (normal and diseased) and veins.

[0167] 10671 is known as tryptophan 5-monooxygenase or TPH. TPH modulates the rate limiting step in the synthesis of serotonin in the central nervous system. This enzyme has been shown to be primarily expressed in CNS structures (pineal gland, dorsal and medial raphe nuclei, gut enterochromaffin cells) (Walther, D J et al., Synthesis of serotonin by a second tryptophan hydroxylase isoform, 2003, Science, 299: 76). Our data is the first to describe the presence of 10671 in blood vessels and the first to support a novel role for the local production of serotonin in peripheral blood vessels. There is a well described role for serotonin in promoting vascular tone and advancing proliferative disorders such as atherosclerosis (Watanabe, T et al., Oxidized low density lipoproteins potentiate the mitogenic effect of 5-hydroxytryptamine on vascular smooth muscle cells, 2002, Jpn Heart J, 43: 35-42. Kandabaski, T et al., Involvement of rho-kinase in agonists-induced contractions of arteriosclerotic human arteries, 2002, 22: 243-248.). Therefore, reducing the levels of serotonin, by inhibiting tryptophan monooxygenase, will promote local vasorelaxation as well as diminish plaque development seen in atherosclerosis. Due to 10671 mRNA expression in human vasculature, along with its functional role, modulators of 10671 activity would be useful in treating disorders associated with cardiovascular disease including but not limited to atherosclerosis. 10671 polypeptides of the present invention are useful in screening for modulators of 10671 activity.

[0168] Gene ID 261

[0169] The human 261 sequence (SEQ ID NO:77), known also as Kappa-type 3 opioid receptor, is approximately 2534 nucleotides long including untranslated regions. The coding sequence, located at about nucleic acid 118 to 1230 of SEQ ID NO:77, encodes a 370 amino acid protein (SEQ ID NO:78).

[0170] As determined by TaqMan analysis, 261 mRNA was expressed in a limited number of human tissues, namely CNS tissues such as artery, vein, heart, kidney and skeletal muscle. 261 mRNA was expressed in mononuclear cells, spleen, and erythroid progenitor cells. 261 mRNA was also significantly upregulated in atherosclerotic human arteries compared to normal tissues (t-test, p<0.05). 261 mRNA was robustly expressed in cultured human monocytes and macrophages. 261 mRNA was also downregulated in monocytes and macrophages treated with interferon gamma and soluble CD40L.

[0171] 261 is a de-orphaned G-protein coupled receptor known as Kappa-type 3 opioid receptor. Nociceptin has been identified as the ligand of this GPCR. Nociceptin receptors are densely expressed pre and post-synaptically in the nucleus tractus solitarius (Mao L, Wang J Q. Pharmacological activation of nociceptin receptors in the nucleus tractus solitarius inhibits baroreceptor reflex in pentobarbital-anesthetized rats. 2000; Neuroscience, 101:435-40). The activation of these central receptors has been shown to be involved in the regulation of heart rate and blood pressure (Mao L, Wang J Q. Microinjection of nociceptin (Orphanin FQ) into nucleus tractus solitarii elevates blood pressure and heart rate in both anesthetized and conscious rats. 2000; J Pharmacol Exp Ther, 294:255-62). Due to 261 mRNA expression in human vasculature, along with its functional role, modulators of 261 activity would be useful in treating disorders associated with cardiovascular disease including but not limited to atherosclerosis. 261 polypeptides of the present invention are useful in screening for modulators of 261 activity.

[0172] Gene ID 44570

[0173] The human 44570 sequence (SEQ ID NO:79), known also as ATP-binding cassette, sub-family A (ABC 1), member 6, is approximately 5296 nucleotides long including untranslated regions. The coding sequence, located at about nucleic acid 176 to 5029 of SEQ ID NO:79, encodes a 1617 amino acid protein (SEQ ID NO:80).

[0174] As determined by TaqMan analysis, 44570 mRNA was expressed in a variety of human tissues, including artery, vein, heart, liver, brain, ovary, macrophages and breast tissues. 44570 mRNA was strongly expressed in vascular smooth muscle and endothelial cells. 44570 mRNA was also significantly upregulated in failing human myocardium when compared to non-failing hearts (t-test, p=0.005). In Situ hybridization experiments indicated that 44570 mRNA was expressed in human myocytes.

[0175] 44570 is an ATP-binding cassette, sub-family A (ABC1), member 6, which was cloned as a novel member of the ABC A transporter subfamily from human macrophages.(Kaminski W E, Wenzel J J, Piehler A, Langmann T, Schmitz G. ABCA6, a novel a subclass ABC transporter. Biochem Biophys Res Commun. 2001 Aug. 3;285(5): 1295-301). ATP-binding cassette (ABC) transporters are expressed in monocyte-derived macrophages and are subject to sterol-dependent regulation. ABCA6-like transporters are thought to be involved in macrophage lipid homeostasis. It has been described in the literature that nuclear hormone receptors including LXR/RXR and PPAR/RXR heterodimers act as direct or indirect regulators of other ABC transporters and are potential targets for pharmacological intervention in cardiovascular disease. (Schmitz, G and Drobnik, W, ATP-binding cassette transporters in macrophages: promising drug targets for treatment of cardiovascular disease. Curr Opin Investig Drugs. 2002 June;3(6):853-8). The enriched vascular expression of this target and the regulation in human heart failure suggest a role for ABCA6 in cardiovascular disease. Due to 44570 mRNA expression in highly vascularized tissues, along with its functional role, modulators of 44570 activity would be useful in treating disorders associated with cardiovascular disease, including but not limited to atherosclerosis. 44570 polypeptides of the present invention are useful in screening for modulators of 44570 activity.

[0176] Gene ID 41922

[0177] The human 41922 sequence (SEQ ID NO:81), known also as blood plasma glutamate carboxypeptidase (PGCP) is approximately 1928 nucleotides long including untranslated regions. The coding sequence, located at about nucleic acid 167 to 1585 of SEQ ID NO:81, encodes a 472 amino acid protein (SEQ ID NO:82).

[0178] As determined by TaqMan analysis, 41922 mRNA was expressed in a variety of human tissues and cells including bladder, osteoblasts, veins, CNS structures and pancreas. 41922 mRNA was strongly expressed in normal human arteries and human umbilical vein endothelial cells. 41922 mRNA was significantly upregulated in congestive heart failure samples when compared to non-failing hearts (t-test, p=0.005). In rats treated with antihypertensive agents for 28 days, 41922 was upregulated in aortas compared to the aortas of vehicle treated controls. Furthermore, 41922 was expressed at significantly higher levels in the aortas of spontaneously hypertensive and stroke-prone strains at 15 weeks of age when compared to Wistar Kyoto normotensive age-matched controls. Additionally, there is a trend toward upregulation at a young age (5 wks) suggesting an increase in gene expression which corresponds closely to levels of mean arterial blood pressure. Finally, in rennin transgenic and Sprague Dawley rats, 41922 was upregulated in the aortas of the 15 week old mice when compared to younger 5 week old counterparts, suggesting an age dependent increase.

[0179] 41922 is a carboxypeptidase also known as PGCP. The specific substrates of 41922 are unknown although it has been shown to function as a glutamate carboxypeptidase, as a dipeptidyl peptidase, as an endopeptidase and an esterase (Gingras R, Richard C, El-Alfy M, Morales C R, Potier M, Pshezhetsky A V. Purification, cDNA cloning, and expression of a new human blood plasma glutamate carboxypeptidase homologous to N-acetyl-aspartyl-alpha-glutamate carboxypeptidase/prostate-specific membrane antigen. J. Biol. Chem. 1999 Apr. 23; 274(17):11742-50). The carboxypeptidase is thought to be responsible for the processing and/or degradation of peptide hormones such as neuropeptides and glutamate. Studies have shown that PGCP is secreted from COS cells and is expressed in blood plasma. The results of the studies described herein indicate that 41922 is highly expressed in arteries and other tissues involved in blood pressure maintenance (veins, HUVECs). Furthermore enhanced expression of 41922 was observed in the hypertensive states. This expression and regulatory data suggest that 41922 is involved in regulating vasomotor tone and heart failure. Therefore modulators of 41922 activities would be useful in treating disorders associated with cardiovascular disease, including but not limited to vasomotor tone and heart failure. 41922 polypeptides of the present invention are useful in screening for modulators of 41922 activity.

[0180] Gene ID 2552

[0181] The human 2552 sequence (SEQ ID NO:83), known also as glutamyl aminopeptidase (EAP) (EC 3.4.11.7), aminopeptidase A (APA), and differentiation antigen GP160, is approximately 3763 nucleotides long including untranslated regions. The coding sequence, located at about nucleic acid 216 to 3089 of SEQ ID NO:83, encodes a 957 amino acid protein (SEQ ID NO:84).

[0182] As determined by TaqMan analysis, 2552 mRNA was expressed in a variety of human tissues and cells including small intestine, colon, hemangiomas, kidney and liver. In marmoset livers 2552 mRNA was upregulated by niacin, cholestyramine, combination therapy with fibrate/statin, and probucol therapy. 2552 mRNA was also upregulated by fibrates in marmoset livers and human hepatocytes. Cirprofibrate was shown to downregulate 2552 mRNA in the livers of mice. In LDLR knock-out mice livers, 2552 mRNA was shown to be downregulated when the mice were fed a high-fat diet.

[0183] Thus given that expression of 2552 mRNA is modulated by lipid-lowering therapies as well as high-fat diets, it is apparent that 2552 is modulated in response to lipids and/or bile acid levels in the liver. Furthermore, 2552 is known to cleave CCK8, a peptide hormone that causes gall bladder contraction. (See Migaud et al. The in vivo metabolism of cholecystokinin (CCK-8) is essentially ensured by aminopeptidase A. Peptides. 1996; 17(4):601-607; Shaffer. Review article: control of gall-balder motor function. Ailment Pharmacol. Ther. May 2000;14 Suppl 2:2-8). While not wanting to be bound by theory, it is hypothesized that inhibition of 2552 will lead to increased CCK8 levels which would result in increased gall bladder emptying. Gall bladder emptying removes cholesterol from the body and therefore would result in a decrease in liver cholesterol and a subsequent decrease in plasma cholesterol and triglycerides. Thus given the expression of 2552 is modulated by lipid lowering therapies and high fat diets it is believed that 2552 is involved in cardiovascular disease, including but not limited to atherosclerosis, dyslipidemia and coronary artery disease. 2552 polypeptides of the present invention are useful in screening for modulators of 2552 activity Gene ID 2417

[0184] Human 2417, known also as the purinergic receptor P2Y9, is encoded for by the nucleotide sequence of SEQ ID NO:85. The 2417 nucleotide sequence is approximately 1302 nucleotides long including untranslated regions. The coding sequence, located at about nucleic acid residues 152 to 1264 of SEQ ID NO:85, encodes a 370 amino acid protein (SEQ ID NO:86).

[0185] As determined by TaqMan analysis, 2417 mRNA was expressed in a variety of human tissues and cells, including platelets, megakaryocytes, HUVECs, spinal cord, brain cortex, brain hypothalamus, breast, ovary and peripheral blood leukocytes. Furthermore, differential expression of 2417 mRNA was found when platelets obtained from normal volunteers were compared to platelets obtained from patients with coronary artery disease (e.g., unstable angina, stable angina, and myocardial infraction). The platelets obtained from patients with coronary artery disease were found to express 2417 mRNA at significantly higher levels than the control platelets.

[0186] 2417, also known as P2Y9, was classified as a purinergic receptor based upon sequence identity with P2Y receptors. P2Y9 was recently shown to bind lysophosphatidic acid and activate adenylyl cyclase. (See Noguchi et al. (2003) Identification of P2Y9/GPR23 as a Novel G Protein-Coupled Receptor for Lysophosphatidic Acid, Structurally Distant from the Edg Family. J. of Biol. Chem. in pres.). Interestingly, inhibition of adenylyl cyclase is involved in platelet activation and aggregation. (See Kunapuli and Daniel. (1998) Biochem. J.; 336:513-523). For example, inhibitors of platelet aggregation have been shown to block ADP-induced inhibition of adenylate cyclase. (See Kaniel et al. (1998) J. Biol. Chem.; 273:2024-2029).

[0187] The invention is based, at least in part, on the discoveries that 2417 is expressed in platelets and megakaryocytes and is expressed at elevated levels in platelets obtained from patients diagnosed with coronary artery disease. The findings herein support the conclusion that 2417 is involved in thrombosis. Furthermore, the recent discovery that P2Y9 activates adenylyl cyclase supports the findings herein that 2417 is involved in thrombosis. Thus, 2417 polypeptides of the present invention are useful in screening for modulators of 2417 and modulators of 2417 would be useful in treating thrombotic disorders.

[0188] Gene ID 19319

[0189] The human 19319 sequence (SEQ ID NO:87), known as Pantothenate kinase 1 (EC 2.7.1.33) (Pantothenic acid kinase 1) (hPanK1) (hPanK), is approximately 2510 nucleotides long including untranslated regions. The coding sequence, located at about nucleic acid 152 to 1096 of SEQ ID NO:87, encodes a 314 amino acid protein (SEQ ID NO:88).

[0190] As determined by TaqMan analysis, 19319 mRNA was expressed in a variety of human tissues, including liver, kidney, skeletal muscle and brain. 19319 mRNA was upregulated in the livers of mice administered ciprofibrate. 19319 mRNA was downregulated by cholesterol in ApoE knock-out mice and downregulated in LDLR knock-out mice administered a high-fat diet. 19319 mRNA is also upregulated by cholestyramine and cerivistatin in the livers of marmosets.

[0191] 19319 or PANK1 is a Pantothenate kinase. There are four members of the PANK family of genes, namely PANK1, PANK2, PANK3, and PANK4. Pantothenate kinases are known to play a role in regulating intracellular CoA concentration. The PANK enzymes phosphorylate pantothenate, generating D-4′-phosphopantothenate and catalyze the phosphorylation of N-pantothenoyl-cyteine and pantetheine. Pantetheine is hydrolyzed by vanin-1, an ectoenzyme, generating pantothenate and cysteamine. Pantethine is a lipid-lowering drug and it is believed that the breakdown of Pantetheine by vanin-1 generates the active agent, cysteamine, responsible for the lipid-lowering effect. (Atherosclerosis. 1987; 68(1-2):41-49). It is also known that cysteamine is found naturally in the liver. (FEBS Letters 483 (2000) 149-154). The present inventors believe that inhibition of PANK1 will be beneficial to lowering cholesterol. While not wanting to be bound by theory, it is apparent from the teachings present herein that 19319 responds to lipid levels, e.g., 19319 is upregulated by ciprofibrate in mouse livers and downregulated by cholesterol administration in ApoE knockout mice and by high fat diets in LDLR knockout mouse livers. Furthermore, the expression pattern of 19319 (e.g., liver) is consistent with 19319's involvement in dyslipidemia. Additionally 19319 diminishes the level of pantetheine by hydrolysis, reducing the level of cysteamine in the liver. Therefore inhibition of 19319 would lead to an increase in the level of cysteamine which would reduce serum cholesterol and triglycerides. Additionally inhibition of PANK1 should also lead to a decrease in the level of CoA available in the liver for the production of HMGCoA, a cholesterol precursor. Inhibition of PANK1 should also lead to a decrease in the generation of acyl-carrier protein, an important agent in the generation of fatty acids. Thus, 19319 polypeptides of the present invention are useful in screening for modulators of 19319 and modulators of 19319 can be beneficial for lowering cholesterol and triglycerides. Therefore, 19319 modulators can be used to ameliorate cardiovascular disease, including but not limited to atherosclerosis, and coronary artery disease.

[0192] Gene ID 43969

[0193] The human 43969 sequence (SEQ ID NO:89), known also as HAOX1, Glycolate oxidase or GOX is approximately 1136 nucleotides long including untranslated regions. The coding sequence, located at about nucleic acid 24 to 1136 of SEQ ID NO:89, encodes a 370 amino acid protein (SEQ ID NO:90).

[0194] As determined by TaqMan analysis, 43969 mRNA was expressed almost exclusively in the liver. 43969 was differentially expressed in several mouse models used in assessing lipid levels. For example 43969 was downregulated in the livers of mice administered ciprofibrate, ApoE knock-out mice administered cholesterol and in LDLR knock-out mice maintained on a high-fat diet.

[0195] 43969 or Glycolate oxidase, is an enzyme that oxidizes 2-hydroxyacids with a preference for glycolate, but which can also utilize 2-hyudroxy fatty acids. Additionally 46476 (SEQ ID NO:129, 130) is a glyoxylate reductase and catalyzes the reverse reaction. Studies have shown that glycolate feeding has been shown to increase cholesterol and triglycerides by an unclear mechanism (Pharmacol Res. 1993, 27:289-97) and hyperlipidemia in rats fed a cholesterol- and fat-rich diet was associated with hyperoxaluria (Urol Res. 2000, 28:404-15). Given that glyoxylate can be converted to oxalate, it is therefore likely that the lipid-raising effect of glycolate is via glyoxylate. Based on known information regarding glyoxylate and based on our data demonstrating regulation of genes in the pathway, we hypothesize that glyoxylate and/or glycolate are metabolic sensors in the liver. Our data indicate that ciprofibrate causes gene changes that would lead to a decrease in the levels of glyoxylate and an increase in glycolate. We hypothesize that PPAR alpha agonists may improve lipid profiles, in part, by releasing the inhibitory effect of glyoxylate on beta-oxidation. We hypothesize that it is the conversion of glycolate to glyoxylate that causes an increase in liver cholesterol and triglycerides. Therefore, inhibition of 43969 will lead to a decrease of both triglycerides and cholesterol in the liver by limiting the conversion of glycolate to glyoxylate. Thus, 43969 polypeptides of the present invention are useful in screening for modulators of 43969 and inhibitors of 43969 can be used to ameliorate cardiovascular disease, including but not limited to atherosclerosis, dyslipidemia and coronary artery disease.

[0196] Gene ID 8921

[0197] The human 8921 sequence (SEQ ID NO:91), known also as ADHP_HUMAN Alcohol dehydrogenase class II pi chain precursor (ADH4) (EC 1.1.1.1) or alcohol dehydrogenase 2 (ADH2), class II, is approximately 1981 nucleotides long including untranslated regions. The coding sequence, located at about nucleic acid 62 to 1240 of SEQ ID NO:91, encodes a 392 amino acid protein (SEQ ID NO:92).

[0198] As determined by TaqMan analysis, 8921 mRNA was expressed mainly in the liver with much lower expression in the small intestine and skin. 8921 was downregulated in LDL receptor knockout mice maintained on a high fat diet (1.25% cholesterol +0.5% sodium cholate) and Western diet (0.15% cholesterol) when compared with LDL receptor knockout mice maintained on a normal chow diet (10 mouse liver samples per group). 8921 mRNA was found to be downregulated 0.76−(p=0.02) and 0.77-(p=0.005) fold on the high fat and Western diet, respectively. Using microarray experiments, 8921 mRNA was found to be downregulated by 0.59-fold, p=0.002 when comparing liver samples of mice treated with ciprofibrate with control liver samples. In marmosets treated with cholestyramine and cerivastatin, there was a marked increase in 8921 mRNA expression (1.5- and 1.4- fold, respectively).

[0199] Human ADH2 belongs to the alcohol dehydrogenase family composed of five classes and seven isoforms. Unlike other ADHs, ADH2 is expressed mainly in the liver. ADHs are thought to metabolize a wide variety of substrates, including ethanol, retinol, other aliphatic alcohols, hydroxysteroids, and lipid peroxidation products. Although the 7 enzymes are similar in amino acid sequence and in structure, the ADHs differ in their preferred substrates. ADH2 has lower affinity for ethanol than other ADHs but at intoxicating levels the enzyme accounts for 40% of the total ethanol oxidation rate. It exhibits high activity for oxidation of long-chain aliphatic alcohols and aromatic alcohols, converting alcohols to aldehydes for synthesis of fatty acids. Reports also indicate that ADH2 is second only to ADH4 for efficient oxidation of all-trans-retinol. ADH2 is expressed in the liver and preferably converts retinol to retinal over ethanol. However at high levels of ethanol, ADH2 is responsible for 40% of ethanol oxidation. Ethanol is a competitive inhibitor against retinol for ADH2 and it is hypothesized that at higher levels of alcohol in the liver, ADH2 oxidizes ethanol rather than retinol. Further support is evident by the finding that alcohol consumption has been shown to result in elevated HDL-cholesterol levels and reduce the risk of myocardial infraction. Furthermore studies indicate that synthetic retinoids adversely affect plasma cholesterol levels in humans resulting in increased total cholesterol and LDL-cholesterol levels, and decreased HDL-C. In addition, ADH2 activity in humans is significantly higher in males than in females; males are also known to have lower HDL-C than females. It is therefore likely that ADH2 is responsible for the beneficial effects of ethanol consumption on HDL-C profile resulting in a decrease of retinol oxidation. Thus given that expression of 8921 mRNA is modulated by lipid-lowering therapies as well as high-fat diets, and the studies to date, it is apparent that 8921 is modulated in response to lipids and/or bile acid levels in the liver. Therefore, inhibiting ADH2 would have a beneficial effect on lipid profiles by way of a decrease in retinol oxidation and inhibitors of ADH2 could be used to treat cardiovascular disease, including but not limited to atherosclerosis, dyslipidemia and coronary artery disease. Thus, 8921 polypeptides of the present invention are useful in screening for modulators of 8921 and modulators of 8921 would be useful in treating cardiovascular disease, including but not limited to atherosclerosis, dyslipidemia and coronary artery disease.

[0200] Gene ID 8993

[0201] The human 8993 sequence (SEQ ID NO:93), is an ADP-ribosylarginine hydrolase and is approximately 1365 nucleotides long including untranslated regions. The coding sequence, located at about nucleic acid 106 to 1179 of SEQ ID NO:93, encodes a 357 amino acid protein (SEQ ID NO:94).

[0202] As determined by TaqMan analysis, 8993 mRNA was expressed at highest levels in megakaryocytes generated in vitro. Significant 8993 mRNA expression was also observed at high levels in the spleen, peripheral blood monocytes and B cells. 8993 mRNA was detected at significantly higher levels in the platelets of patients with unstable angina or acute coronary syndrome than in platelets from patients with no coronary artery disease.

[0203] Mono-ADP-ribosylation of arginine is a reversible modification of proteins with NAD:arginine ADP-ribosyltransferases and ADP-ribosylarginine hydrolases catalyzing the opposing reactions in the cycle. (Journal of Biological Chemistry. 1993. 268(24): 17837). The intracellular ADP-ribosylation enzymes are implicated in cell-signaling (EMBO J. 2003. 22(9):1953). 8993 does not have a predicted signal peptide and therefore is probably not a secreted enzyme. Finally, cytoskeletal components, such as actin, are potential targets for ADP-ribosylation. ADP ribosylation of actin would inhibit cytoskeletal reorganization, an early event in platelet activation.

[0204] The precise cellular target of ADP-ribosylarginine hydrolase is not known, however inhibition of ADP-ribosyl hydrolase would result in increased adenylyl cyclase activation and subsequent increased cyclic AMP levels, which results in the inhibition of platelet degranulation. Either independent of the increased cyclic AMP, or in parallel, ADP-ribosyl hydrolase inhibition may also block the GPCR signaling and cytoskeletal reorganization that is necessary for platelet degranulation. The significant increase in levels of 8993 mRNA in the platelets of patients with unstable angina, as compared with patients without coronary artery disease, suggests a possible role for 8993 in thrombus formation. Thus, based upon the teachings present herein particularly the elevated expression of 8993 mRNA observed in patients with coronary artery disease when compared with those without coronary artery disease, it is the present invention that 8993 is involved in thrombus formation and inhibition of 8993 would inhibit platelet aggregation and thrombus formation. 8993 polypeptides of the present invention are useful in screening for modulators of 8993 activity.

[0205] Gene ID 955

[0206] The human 955 sequence (SEQ ID NO:95), is known as PTP-PEST, a human non-transmembrane protein tyrosine phosphatase, and is approximately 3425 nucleotides long including untranslated regions. The coding sequence, located at about nucleic acid >1 to 2619 of SEQ ID NO:95, encodes a 872 amino acid protein (SEQ ID NO:96).

[0207] As determined by TaqMan analysis, 955 mRNA was highly expressed in brain and megakaryocytes. Additionally 955 mRNA was highly expressed in human platelets.

[0208] 955 is a protein tyrosine phosphatase that is known to be associated with focal adhesion proteins and has been implicated in cell migration via the action of integrins. (J. Cell Sci. 2002; 115(Pt22):4305). Furthermore 955 has been shown to interact with the PDGF receptor. (Biochemistry. 2003; 42(9):2691). The studies presented herein teach that 955 is expressed in megakaryocytes and human platelets. While not wanting to be bound by theory, inhibition of PTP-PEST would provide a means to inhibit platelet activation and thrombus formation. Thus inhibitors of 955 can be used to treat arterial thrombosis. 955 polypeptides of the present invention are useful in screening for modulators of 955 activity.

[0209] Gene ID 32345

[0210] The human 32345 sequence (SEQ ID NO:97), known as duet or trad kinase (Gene. 199; 227:249-255) is approximately 5355 nucleotides long including untranslated regions. The coding sequence, located at about nucleic acid 118 to 3987 of SEQ ID NO:97, encodes a 1289 amino acid protein (SEQ ID NO:98).

[0211] As determined by TaqMan analysis, 32345 mRNA was most highly expressed in arteries (normal and diseased), HUVECs, skeletal muscle, CNS structures and megakaryocytes. In addition, 32345 mRNA was upregulated by mevastatin, an HMG-CoA reductase inhibitor, in HUVECs. In rat aortas, 32345 mRNA was upregulated in SHRs and SHR-sps with age compared to WKY controls. Upregulation of 32345 mRNA was also observed in the presence of 3 day or 28 day treatment with anti-hypertensives.

[0212] The cellular localization of 32345 shows overlap with actin-cytoskeletal elements. In general, Dbl-homology guanine nucleotide exchange factors (DH-GEFs) regulate actin cytoskeletal reorganization, cell adhesion, and gene transcription via activation of Rho GTPases. Trio, which is closely related to 32345, is a unique Rho GEF, because it has separate GEF domains, GEFD1 and GEFD2 that control the GTPases RhoG/Racl and RhoA, respectively. It is the present invention that inhibitors of 32345 will result in decreased vascular tone and blood pressure. The invention is based at least in part on the studies indicating that 32345 is homologous to Trio, the studies first disclosed herein indicating 32345 mRNA is expressed in vascular tissues, is regulated in HUVECs by a Rho inhibitor and in rat aortas from tone models. Thus inhibitors of 32345 can be used to treat cardiovascular disease, specifically those indications in which vascular tone and blood pressure is a problem. 32345 polypeptides of the present invention are useful in screening for modulators of 32345 activity.

[0213] Gene ID 966

[0214] The human 966 sequence (SEQ ID NO:99), known as R-PTP-epsilon is approximately 2160 nucleotides long including untranslated regions. The coding sequence, located at about nucleic acid 52 to 2154 of SEQ ID NO:99, encodes a 700 amino acid protein (SEQ ID NO:100). 966 is a protein tyrosine phosphatase epsilon that was identified as having both a cytoplasmic and transmembrane form. The cytoplasmic form is induced by LPS and is thought to be expressed in macrophages.

[0215] As determined by TaqMan analysis, 966 mRNA was upregulated in human diseased arteries compared to normal vessels. Additionally, there was significant upregulation in ApoE knockout mouse aortas at various ages compared to wild-type counterparts. The upregulation of 966 mRNA in mice aortic arches was inhibited when captopril, an ACE inhibitor and anti-atherogenic drug, was given to the mice for 6 or 12 weeks.

[0216] The invention is based at least in part on studies which demonstrate R-PTP-epsilon dephosphorylates interleukins in macrophages, which inhibits IL-6 and IL-10 induced JAK/STAT signaling. IL-10 is a known anti-atherogenic factor and when overexpressed can reduce the progression of atherosclerosis in mouse models and conversely, IL-10 deficiency promotes atherogenesis. Additionally the studies disclosed herein demonstrate differential expression in diseased arteries and ApoE knockout mice aortas. Therefore, inhibition of 966 will specifically prevent the inactivation of IL-10 and promote JAK/STAT signaling. It is the present invention that inhibition of 966 would inhibit macrophage activation and plaque development during the formation of atherosclerotic lesions and therefore inhibitors of 966 can be used to treat cardiovascular disorders including but not limited to atherosclerosis. 966 polypeptides of the present invention are useful in screening for modulators of 966 activity.

[0217] Gene ID 1920

[0218] The human 1920 sequence (SEQ ID NO:101), known as glutamate receptor 2 or AMPA2, is approximately 3331 nucleotides long including untranslated regions. The coding sequence, located at about nucleic acid 161 to 2812 of SEQ ID NO:101, encodes an 883 amino acid protein (SEQ ID NO:102).

[0219] As determined by TaqMan analysis using a human tissue panel, 1920 mRNA expression was fairly restricted in human tissues, with the most abundant expression observed in brain cortex, followed by hypothalamus, pituitary gland, diseased aorta, dorsal root ganglion and normal artery. In SHR and SHR-sp aortas, 1920 mRNA was dramatically down-regulated (p<0.001) prior to and during the hypertensive state (at 5 and 15 weeks of age) compared to WKY controls. 1920 mRNA was also significantly expressed in rat mesenteric vascular bed.

[0220] L-glutamate acts as an excitatory neurotransmitter at many synapses in the central nervous system. The postsynaptic actions of GLU are mediated by a variety of receptors that are named according to their selective agonists. This receptor binds AMPA(quisqualate)>glutamate>kainate. There are two splice isoforms, called “flip” and “flop” which are created by two alternative, adjacent exons preceding the 4th transmembrane domain. The two isoforms have different function, pharmacology and localization. In addition, 1920 is subject to post-translational RNA editing of one nucleotide (and hence one amino acid) which can also change functional properties.

[0221] Regulation of vascular tone by glutamate is a novel disease hypothesis. The presence of glutamate receptors (1920) in the vasculature and the regulation of 1920 and correlation of expression of 1920 with a hypertensive state suggests a role for glutamate signaling in the cardiovascular system which is independent of its role in neural transmission. Due to 1920 mRNA expression, along with its functional role, modulators of 1920 activity would be useful in treating disorders associated with cardiovascular disease, including but not limited to atherosclerosis. 1920 polypeptides of the present invention are useful in screening for modulators of 1920 activity.

[0222] Gene ID 17318

[0223] The human 17318 sequence (SEQ ID NO:103), known as GPR41, is approximately 1830 nucleotides long including untranslated regions. The coding sequence, located at about nucleic acids 449 to 1786 of SEQ ID NO:103, encodes a 445 amino acid protein (SEQ ID NO:104).

[0224] As determined by TaqMan analysis, 17318 mRNA was expressed in a variety of human tissues, including blood vessels, kidney, heart, tumors of the colon, lung, breast and prostate and also in CNS structures. Additionally, it is expressed in macrophages, megakaryocytes, and erythroid progenitor cells. It is also well expressed and significantly upregulated in atherosclerotic human arteries (p<0.05; t-test).

[0225] 17318 or GPR41 was recently de-orphaned as a receptor for propionate and butyrate (short chain fatty acids, SCFAs) (Brown et al., JBC, 2003; 278: 11312-11319). SCFAs have been shown to have an anti-inflammatory effect in vitro and in vivo (Cavaglieri et al., Life Sci. 2003 Aug. 15;73(13):1683-90 and Rodriguez-Cabezas et al., J Nutr. 2002 November;132(11):3263-71). Some of the mechanisms associated with this are reductions in IL-2 production in lymphocytes, decreased TNFαand nitric oxide production and increased IL-10 production. Based in part on the fact that the presence of pro-inflammatory mediators such as NO and interleukins are a determinant of the disease process in vessel wall atherosclerosis, we hypothesize that agonism of this SCFA-stimulated GPCR would result in a reduction of the macrophage inflammatory response and cytokine release in atherosclerotic plaques and thus diminished lesion size. Thus, inhibitors of 17318 can be used to ameliorate cardiovascular disease, including but not limited to atherosclerosis and coronary artery disease. 17318 polypeptides of the present invention are useful in screening for modulators of 17318 activity.

[0226] Gene ID 1510

[0227] The human 1510 sequence (SEQ ID NO:105), known as mitogen-activated protein kinase kinase kinase 8, or serine/threonine-specific protein kinase, cot [cancer osaka thyroid oncogene], 58K form; or, tumor progression locus 2 (tpl2), is approximately 2763 nucleotides long including untranslated regions. The coding sequence, located at about nucleic acids 367 to 1770 of SEQ ID NO:105, encodes a 467 amino acid protein (SEQ ID NO:106).

[0228] As determined by TaqMan analysis, 1510 mRNA was upregulated in diseased human vessels when compared to normal vessels. Furthermore, 1510 mRNA was upregulated in the aortic arches of ApoE knockout mice relative to abdominal aorta, at 12 weeks. This elevated expression can be blocked with the angiotensin converting enzyme inhibitor, captopril.

[0229] 1510, known as mitogen-activated protein kinase kinase kinase 8, or serine/threonine-specific protein kinase, cot [cancer osaka thyroid oncogene], 58K form; or, tumor progression locus 2 (tpl2), contains a protein kinase domain and has been shown to have serine/threonine kinase activity (Aoki M, Hamada F, Sugimoto T, Sumida S, Akiyama T, Toyoshima K.; J. Biol. Chem. 1993 Oct. 25;268(30):22723-32). Inhibitors of 1510 would be expected to block NFκB mediated inflammatory responses in macrophages. There may also be a role for this kinase in activation of ERK and other MAPK (e.g. JNK and p38), which are also known to participate in the inflammatory process in macrophages (e.g. production of the pro-inflammatory cytokine, TNFα). Repression or dampening of the inflammatory response in macrophages would be expected to hinder or halt the progression of atherosclerosis in humans. Thus, inhibitors of 1510 can be used to ameliorate cardiovascular disease, including but not limited to atherosclerosis and coronary artery disease. 1510 polypeptides of the present invention are useful in screening for modulators of 1510 activity.

[0230] Gene ID 14180

[0231] The human 14180 sequence (SEQ ID NO:107), known as Human Rac-gamma serine/threonine protein kinase (EC 2.7.1.-) (RAC-PK-gamma) (Protein kinase Akt-3) (Protein kinase B, gamma) (PKB gamma), is approximately 2811 nucleotides long including untranslated regions. The coding sequence, located at about nucleic acids 1 to 1440 of SEQ ID NO:107, encodes a 479 amino acid protein (SEQ ID NO:108).

[0232] As determined by TaqMan analysis, 14180 mRNA was upregulated in diseased human vessels compared to normal vessels. Significant 14180 mRNA levels were expressed in the brain.

[0233] Human 14180 or Human Rac-gamma serine/threonine protein kinase (EC 2.7.1.-) (RAC-PK-gamma) (Protein kinase Akt-3) (Protein kinase B, gamma) (PKB gamma), is one of three members of the AKT/PKB family of serine/threonine kinases (AKT1, PKB alpha; AKT2, PKB beta; AKT3, PKB gamma). Each is expressed with distinct tissue distribution and shares over 80% amino acid similarity. PKB/Akt is activated in cells exposed to diverse stimuli such as hormones, growth factors, and extracellular matrix components. PKB/Akt phosphorylates and regulates the function of many cellular proteins involved in processes that include metabolism, apoptosis, and proliferation. The increased activity in leukocytes seems to be largely progrowth (it inactivates pro-apoptotic genes). C(2)-ceramide was suggested to inhibit LPS-induced NO production through down-regulating the activation of Akt in RAW 264.7. IFN-gamma induces the phosphorylation of the serine/threonine kinase Akt in primary human peripheral blood monocytes, and abrogation of the IFN-stimulated Akt activation by phosphatidylinositol-3 kinase (PI-3K) inhibitors prevents IFN-induced adhesion in these cells. An inhibitor of this kinase would therefore be expected to block inflammatory processes in macrophages. Such repression, or dampening of the inflammatory response in macrophages would be expected to hinder, or halt the progression of atherosclerosis in humans. Therefore inhibitors of 14180 would be useful to ameliorate cardiovascular disease, including but not limited to atherosclerosis and coronary artery disease. 14180 polypeptides of the present invention are useful in screening for modulators of 14180 activity.

[0234] Gene ID 26005

[0235] The human 26005 sequence (SEQ ID NO:109), is an adenosine deaminase and is approximately 3941 nucleotides long including untranslated regions. The coding sequence, located at about nucleic acids 213 to 1748 of SEQ ID NO:109, encodes a 511 amino acid protein (SEQ ID NO:110).

[0236] As determined by TaqMan analysis, 26005 mRNA was upregulated in diseased human vessels when compared to normal vessels.

[0237] Human 26005 shows sequence similarity to insect and mollusk growth factors. The N terminus contains a secretory signal peptide and the C-terminal half shows significant similarity to adenosine deaminase (ADA), particularly in the conserved catalytic domain. Adenosine deaminase inhibitors are found to have utility in regulating inflammation, hypertension, and ischemic injury. An inhibitor of this enzyme would thereore be expected to elevate the levels of adenosine and thus be useful to ameliorate cardiovascular disease, including but not limited to atherosclerosis and coronary artery disease. 26005 polypeptides of the present invention are useful in screening for modulators of 26005 activity.

[0238] Gene ID 554, 16408 and 42028

[0239] The cholesterol synthesis pathway has been fairly well described and the proteins, or their enzymatic activities, in this pathway are almost all known. In contrast, the pathways that modulate VLDL synthesis (ApoB synthesis, phosphatidylcholine synthesis, triglyceride synthesis) are less well known. Through the use of lipid-altering paradigms, we have found a pathway whose genes are highly regulated by cholesterol/lipid altering treatments. This overall pathway has not been described as being a crucial component of VLDL synthesis and therefore has not been described as being a target for inhibition for dyslipidemias. Each of the individual genes in isolation or combination may be a therapeutic target for a small molecule inhibitor.

[0240] The pathway specifically in the liver involves first the flux of betaine in the liver either by conversion of betaine aldehyde to betaine (via betaine aldehyde dehydrogenase) or by the uptake of betaine into the liver via 554 (Sodium- and chloride-dependent betaine transporter; also called gamma-aminobutyric acid transporter (BGT-1)). Betaine can be ingested in the diet. The foods with the most abundant betaine concentration (mg/100 g) are: wheat bran (1339), wheat germ (1241), spinach (645), pretzels (237), shrimp (218) and wheat bread (201). Betaine is then combined with homocysteine by betaine-homocysteine methyltransferase (BHMT) and is converted to methionine and dimethylglycine. The methionine is converted to S-adenosylmethionine (SAM) via MAT1a and SAM is a methyl donor to generate phosphatidylcholine (PC) from phosphatidylethanolamine (PE) via phosphatidylethanolamine methyltransferase (PEMT). Part of this pathway has been described for PC biosynthesis for bile production (Breslow et al, 2003, J. Lipid Res, June 16), but has not been clearly shown to play a role in regulation of plasma cholesterol levels. The dimethylglycine that is formed from BHMT is converted to sarcosine and then to glycine. The conversion of sarcosine to glycine is mediated by 42028 and the reverse reaction is mediated by 16408 disclosed herein. Glycine is then cleaved in the mitochondria to CO₂ via the glycine cleavage system. Cysteamine, a potent inhibitor of the glycine cleavage system, can block glycine cleavage. Therefore, increased flux of methyl groups through the betaine pathway yields a higher level of PC production and thus a higher level of plasma VLDL and cholesterol (refer to Am J Clin Nutr, 2002, 76:961-967; J Nutr Sci Vitaminol (Tokyo). 1986, 32:537-49; J Nutr Sci Vitaminol (Tokyo). 1990, 36 Suppl 2:S105-10; J Nutr. 1999, 129:1807-13; J Nutr Sci Vitaminol (Tokyo). 1986, 32:537-49; J Nutr Sci Vitaminol (Tokyo). 1990, 36 Suppl 2:S105-10; Int J Clin Pharmacol Ther Toxicol. 1986;24:630-7; Clin Ter. 1989;128:411-22; Acta Biomed Ateneo Parm 1987;58: 143-52).

[0241] Gene ID 554

[0242] The human 554 sequence (SEQ ID NO:111), a sodium- and chloride-dependent betaine transporter (Na⁺/Cl— betaine/GABA transporter); also called gamma-aminobutyric acid transporter (BGT-1), is approximately 1920 nucleotides long including untranslated regions. The coding sequence, located at about nucleic acids 61 to 1905 of SEQ ID NO:111, encodes a 614 amino acid protein (SEQ ID NO:112).

[0243] As determined by TaqMan analysis using a human tissue panel, 554 mRNA is highly expressed in kidney, brain cortex, and liver.

[0244] As determined by microarray profiling experiments comparing LDL receptor knockout mice on a high fat diet (1.25% cholesterol +0.5% sodium cholate) and on a Western diet (0.15% cholesterol) with LDL receptor knockout mice on a normal chow diet (10 mouse liver samples per group), 554 mRNA was downregulated in the LDL receptor knockout mice on a high fat diet and on a Western diet. 554 mRNA was found to be down 0.65-fold due to high fat and Western diet (p<0.001). Additional microarray experiments performed on the livers of mice treated with ciprofibrate demonstrated that 554 mRNA was downregulated by 0.68-fold (p=0.006) in the livers of the mice treated with ciprofibrate compared to control liver samples. 554 mRNA was also shown to be down-regulated by cholesterol in the livers of African Green Monkeys.

[0245] Additional microarray profiling experiments were conducted which compared the expression patterns of 554 mRNA in ApoE knockout mice maintained on a Western diet for 0, 2 and 6 months. Results demonstrated that 554 mRNA was downregulated by 0.51-fold (p<0.001) at 6 months on the Western diet compared to the 0 month time point.

[0246] 554 belongs to the sodium:neurotransmitter symporter (SNF) family that has a common structure of 12 presumed transmembrane helices and includes carriers for GABA, noradrenaline/adrenaline, dopamine, serotonin, proline, glycine, choline, betaine and taurine. In a hyperosmotic environment, BGT-1 is upregulated and betaine is transported into cells along with up to 2 Cl⁻ and 3 Na⁺ ions. Studies of betaine supplementation show an increase of betaine in the plasma along with its accumulation in the liver. In humans, studies show that betaine supplemented diets showed a decrease in plasma homocysteine concentration and a small but significant increase of total and LDL cholesterol concentration compared to the control group. Plasma homocysteine is associated with a higher risk of cardiovascular disease. BHMT converts homocysteine and betaine to methionine and dimethylglycine. Methionine is thought to increase lipoprotein synthesis. Therefore, specifically inhibiting 554 would have a dual beneficial effect on atherosclerosis. First, a reduction of betaine transport into the liver would result in a reduction of betaine and methionine conversion by BHMT therefore a reduction of methionine converted to S-adenosylmethionine (SAM) via MATla. SAM is a methyl donor to generate phosphatidylcholine (PC) from phosphatidylethanolamine (PE) via PEMT to generate lipoprotein particles. Thus, a reduction in synthesis and secretion of lipoproteins would result from the inhibition of 554. Secondly, an inhibition of betaine transport into the liver would result in an increase of betaine in the plasma. Since high betaine levels are known to reduce the levels of plasma homocysteine, BHMT also present in erythroid cells may be responsible for converting plasma betaine and homocysteine to methionine and dimethylglycine, therefore having a positive effect by reducing homocysteine levels in the blood.

[0247] Therefore, based on the function of 554 and its specific expression and regulation patterns, modulators of 554 activity would be useful in treating cardiovascular disorders including but not limited to atherosclerosis. 554 polypeptides of the present invention would be useful in screening for modulators of 554 activity.

[0248] Gene ID 16408

[0249] The human 16408 sequence (SEQ ID NO:113), known as glycine N-methyl transferase, is approximately 1097 nucleotides long including untranslated regions. The coding sequence, located at about nucleic acids 11 to 898 of SEQ ID NO:113, encodes a 295 amino acid protein (SEQ ID NO:114).

[0250] As determined by TaqMan analysis using a human tissue panel, 16408 mRNA expression was elevated in pancreas, liver, prostate tumor and pituitary samples. Furthermore, microarray profiling experiments demonstrated that 16408 mRNA was down-regulated in the livers of LDLR knock-out mice which were fed a high-fat diet. Additionally, microarray profiling experiments demonstrated that 16408 mRNA down-regulated in the livers of mice treated with ciprofibrate.

[0251] 16408 is known as glycine N-methyl transferase (GNMT). Glycine N-methyltransferase (GNMT; EC 2.1.1.20) catalyzes the synthesis of N-methylglycine (sarcosine) from glycine using S-adenosylmethionine (AdoMet) as the methyl donor. GNMT acts as an enzyme to regulate the ratio of S-adenosylmethionine to S-adenosylhomocysteine (AdoHcy) and participates in the detoxification pathway in liver cells. Therefore, based on the function of 16408 and its specific expression and regulation patterns, modulators of 16408 activity would be useful in treating cardiovascular disorders including but not limited to atherosclerosis. 16408 polypeptides of the present invention would be useful in screening for modulators of 16408 activity.

[0252] Gene ID 42028

[0253] The human 42028 sequence (SEQ ID NO:115), known as sarcosine dehydrogenase, is approximately 3363 nucleotides long including untranslated regions. The coding sequence, located at about nucleic acids 259 to 3015 of SEQ ID NO:115, encodes a 918 amino acid protein (SEQ ID NO:116).

[0254] As determined by TaqMan analysis using a human tissue panel, 42028 mRNA expression was elevated is pancreas and liver samples, followed by bladder samples. Furthermore, microarray profiling experiments demonstrated that 42028 was down-regulated in the livers of LDLR knock-out mice fed a high-fat diet. Additionally, microarray profiling experiments demonstrated that 42028 was down-regulated in the livers of mice treated with ciprofibrate.

[0255] 42028 is known as sarcosine dehydrogenase. Sarcosine dehydrogenase (SARDH; EC 1.5.99.1) is a liver mitochondrial matrix flavoenzyme that catalyzes the oxidative demethylation of sarcosine disease. Inhibition of 42028 will cause a decrease in the betaine-homocysteine-methionine conversion pathway and therefore lead to a decrease in VLDL synthesis. Therefore, based on the function of 42028 and its specific expression and regulation patterns, modulators of 42028 activity would be useful in treating cardiovascular disorders including but not limited to atherosclerosis. 42028 polypeptides of the present invention would be useful in screening for modulators of 42028 activity.

[0256] We have identified three genes, namely 554, 16408 and 42028 that are regulated in the liver by manipulation of cholesterol levels in animals. These genes highlight a potential pathway that is involved in VLDL synthesis, probably through regulation of phosphatidylcholine synthesis. Therefore, specifically inhibiting a single gene (or combination of these genes) of this pathway in the liver will lead to alterations in plasma cholesterol and hence may be useful in treating cardiovascular disorders including but not limited to atherosclerosis.

[0257] Gene ID 112091

[0258] The human 112091 sequence (SEQ ID NO:117), known as the Na+ and H+coupled amino acid transport system N, is approximately 2431 nucleotides long including untranslated regions. The coding sequence, located at about nucleic acids 125 to 1639 of SEQ ID NO:117, encodes a 504 amino acid protein (SEQ ID NO:118).

[0259] As determined by TaqMan analysis using a human tissue panel, 112091 mRNA expression was elevated in liver samples, followed by pancreas, cortex, spinal cord, hypothalamus and skeletal muscle samples. Furthermore, 112091 is down-regulated by cholesterol in the livers of African Green Monkeys, it is down-regulated in the livers of LDLR knock-out mice fed a high-fat diet and it is down-regulated in the livers of wild-type mice treated with ciprofibrate.

[0260] 112091 is an amino acid transporter. It is known as solute carrier family 38, member 3, as G17, as SN1, and also as system N1 Na+ and H+-coupled glutamine transporter. It can mediate glutamine efflux as well as uptake. Intake of certain amino acids has an impact on plasma cholesterol levels. For example, methionine raises plasma cholesterol (J Nutr Sci Vitaminol (Tokyo). 1990, 36 Suppl 2:S105-10; J Nutr. 1999, 129:1807-13) and glycine reduces plasma cholesterol (J Nutr Sci Vitaminol (Tokyo). 1986, 32:537-49; J Nutr Sci Vitaminol (Tokyo). 1990, 36 Suppl 2:S105-10). Regulation of 112091 in cholesterol-related models suggests that it may be involved in lipoprotein and cholesterol metabolism. Inhibition of 112091 should result in a decrease in plasma cholesterol levels. 112091 polypeptides of the present invention would be useful in screening for modulators of 112091 activity.

[0261] Gene ID 13886

[0262] The human 13886 sequence (SEQ ID NO:119), known as MAP/microtubule affinity-regulating kinase 1 (MARK1), is approximately 2831 nucleotides long including untranslated regions. The coding sequence, located at about nucleic acids 160 to 2547 of SEQ ID NO:119, encodes a 795 amino acid protein (SEQ ID NO:120).

[0263] As assessed by TaqMan analysis, 13886 mRNA is expressed in a variety of human tissues, with predominance in vascular tissues such as artery, vein, heart, and in brain cortex and pituitary gland. Additionally, it is highly expressed in human umbilical vein endothelial cells. In rats treated with minoxidil, nifedipine or an angiotensin receptor blocker (antihypertensive agents) for three days, expression of 13886 mRNA is dramatically down-regulated in aortas compared to vehicle treated controls (p<0.001; ANOVA). In rats treated with guanylate cyclase stimulators or activators or L-NAME (a nitric oxide synthase inhibitor) for seven days, expression of 13886 mRNA is also significantly down-regulated in aortas compared to vehicle treated controls (p<0.005; ANOVA). In spontaneously hypertensive rats, there is a trend toward upregulation of the kinase in 15 week old aortas compared to WKY normotensive age-matched controls.

[0264] 13886 is known as MAP/microtubule affinity-regulating kinase 1 (MARK1). It is a member of a family of four MARKs, which phosphorylate microtubule associated proteins, tau and MAPs.(J. Biol. Chem. 1996 May 3;271(18):10834-43.) Microtubules can affect the contractile process in several cell types such as fibroblasts, cardiac myocytes and vascular smooth muscle cells of large and intermediate-sized arteries. One possible mechanism of tone is thought to be the imposition of a viscous intracellular load which is correlated with density of microtubules. This opposes the actin cytoskeleton and contraction. Colchicine, nocodazole, demecolcine all caused significant vasoconstriction in isolated rat arterioles (33.9, 29.6, 32.7% compared to basal tone). (Platts et al., Alteration of microtubule polymerization modulates arteriolar vasomotor tone. Am J. Physiol. 1999 July;277 (1 Pt 2):H100-6). Disruption of microtubules via nocodazole has been shown to cause increases in vascular tension and intracellular calcium levels, which is known to cause vascular contraction in coronary arteries (Am J Physiol Heart Circ Physiol. 2000 November;279(5):H2493-501).

[0265] It is believed is that MARK1 via phosphorylation of MAPs will have a similar disruptive effect on microtubules within the vasculature and that inhibiting this kinase will result in vasorelaxation via microtubule stabilization. Thus, inhibitors of 13886 can be used to ameliorate cardiovascular disease, including but not limited to atherosclerosis and coronary artery disease. 13886 polypeptides of the present invention would be useful in screening for modulators of 13886 activity.

[0266] Gene ID 13942

[0267] The human 13942 sequence (SEQ ID NO:121), known as matrix metalloproteinase 19 (MMP19), is approximately 1811 nucleotides long including untranslated regions. The coding sequence, located at about nucleic acids 102 to 1628 of SEQ ID NO:121, encodes a 508 amino acid protein (SEQ ID NO:122).

[0268] As determined by TaqMan analysis, 13942 mRNA is expressed largely in macrophages with some tissue expression found in pancreas, adipose, ovary and kidney. It is also found differentially expressed in human diseased vessels, vs. normal vessels. Additionally, the mouse ortholog of 13942 is found more highly expressed in regions of the aorta (the arch) which contain a higher portion of atherosclerotic lesion, than the abdominal aorta.

[0269] The inhibition of this gene would be expected to decrease the amount of insulin-like growth factor (IGF) I and II that are present in the vessels, by preventing the degradation of insulin-like growth factor binding protein (IGFBP) III (and possibly I, II and IV). IGFBP is one of the principal substrates of MMP19. Increased IGFI is a known smooth muscle cell mitogen and chemotactic agent, increasing neoangiogenesis of endothelial cells and increasing recruitment, differentiation and expression of inflammatory cytokines from macrophages. Inhibiting these biological processes in diseased vessels, would be expected to largely attenuate the inflammatory biology, medial thickening (SMC proliferation and migration) and vascularization of the lesion.

[0270] Thus, inhibitors of 13942 can be used to ameliorate cardiovascular disease, including but not limited to atherosclerosis and coronary artery disease. 13942 polypeptides of the present invention would be useful in screening for modulators of 13942 activity.

[0271] Gene ID 1673

[0272] The human 1673 sequence (SEQ ID NO:123), known as KSYK_HUMAN Tyrosine-protein kinase SYK (EC 2.7.1.112) (Spleen tyrosine kinase), is approximately 2639 nucleotides long including untranslated regions. The coding sequence, located at about nucleic acids 148 to 2055 of SEQ ID NO:123, encodes a 635 amino acid protein (SEQ ID NO:124).

[0273] As assessed by TaqMan analysis, 1673 mRNA is expressed largely in megakaryocytes, progenitors, erythroid cells and neutrophils, with smaller amounts in macrophages. It is also found in tonsil, pancreas, kidney, lymph node and spleen. 1673 mRNA was found to be differentially expressed in human diseased vessels, vs. normal vessels. 1673 mRNA expression was upregulated in diseased monkey aorta and it was dramatically upregulated in ApoE knock out arch/ab mice. Syk is upregulated by ModLDL in macrophages, but not monocytes. No apparent upregulation was observed by CD40L or IFNg in monocytes or macrophages. Additionally, the mouse ortholog of 1673 is more highly expressed in regions of the aorta (the arch) which contain a higher portion of atherosclerotic lesion than the abdominal aorta.

[0274] Inhibitors of 1673 will have profound effects on phagocytosis and leukocyte attachment/recruitment. In addition Syk plays a role in full activation of both NFkB and ERK pathways in macrophages. Thus, an inhibitor of Syk is expected to decrease the load of highly activated macrophages at the site of vascular inflammation and reduce plaque burden. In addition this will likely stabilize the lesion and reduce neovascularization. This would be expected to occur through decreases in the activation of the p65 subunit of NFkB, particularly in response to reactive oxygen species. (J. Biol. Chem. 2003 Jun. 27; 278(26):24233-41. Epub 2003 Apr. 23).

[0275] Thus, inhibitors of 1673 can be used to ameliorate cardiovascular disease, including but not limited to atherosclerosis and coronary artery disease. 1673 polypeptides of the present invention would be useful in screening for modulators of 1673 activity.

[0276] Gene ID 54946

[0277] The human 54946 sequence (SEQ ID NO:125), known as Serine/threonine-protein kinase Sgk2, (EC 2.7.1.37) Serum/glucocorticoid regulated kinase 2, is approximately 2146 nucleotides long including untranslated regions. The coding sequence, located at about nucleic acids 220 to 1503 of SEQ ID NO:125, encodes a 427 amino acid protein (SEQ ID NO:126).

[0278] As assessed by TaqMan analysis using a human tissue panel, 54946 mRNA expression is fairly selective and is primarily expressed in human kidney, liver, pancreas, and brain.

[0279] Additional regulation studies using microarray profiling experiments or RT-PCR experiments demonstrated that i) 54946 mRNA is downregulated by 0.62 fold (p=0.001) by cholesterol in the livers of Apo E knock out mice relative to their wild-type controls; ii) 54946 mRNA is downregulated in livers of Apo E knock out mice vs. wildtype (males and females) mice; iii) 54946 mRNA is more highly expressed in the livers of males than female mice (wild type as well as knock out mice); and iv) 54946 mRNA is upregulated by 2.0 fold (p=0.008) by ciprofibrate in the livers of mice.

[0280] 54946 is known as SGK2. SGK2 is a member of a large family of serine/threonine kinases. Its closest members are SGK1 and SGK3. SGK1 regulates the plasma membrane levels of the sodium channel ENaC in the kidney. 54946 falls into the subfamily which contains AKT (also known as protein kinase B) which is involved in glucose transport, glycogen synthesis, DNA synthesis, anti-apoptotic activity, and cell proliferation. The SGKs appear to have significant impact on the plasma membrane and its components. Despite its name, SGK2, unlike SGK1 is not apparently regulated by serum or glucocorticoids. Ypk1 may be the yeast homolog of SKG2 but is equally similar to SGK1. Ypk1 regulates translation initiation in response to nutrient signals, either through the TOR pathway or in a functionally related pathway parallel to TOR (Genetics. 2002 August; 161(4):1453-64). Ypk1 acts downstream of the Pkh kinases to control endocytosis by phosphorylating components of the endocytic machinery (J Cell Biol 2002 Jan. 21;156(2):241-8), which supports the notion that this family of kinases affects proteins on the plasma membrane. There are two splice variants which exist for SGK2, namely SGK2-alpha and -beta. SGK2-alpha encodes a protein of 367 amino acids (41 kD). SGK2-beta has an alternative 5′ end and encodes a protein of 427 amino acids (48 kD). SGK2 shares about 80% sequence identity with SGK1 and SGK3 within the central catalytic domain. Both the N and C termini share much less similarity. Kobayashi et al. (Biochem J. 1999, 344 Pt 1: 189-97) found that PKD 1 phosphorylated and activated SGK2-alpha in vitro.

[0281] In analogy with SGK1, SGK2 probably plays a role in regulating plasma-membrane proteins. SGK2 likely phosphorylates a ligand expressed in similar tissues which plays a role in stabilizing membrane proteins and which plays a role in regulating cholesterol. The one ligand that fits all these criteria is PDZK1. This protein stabilizes SR-BI on the plasma membrane of hepatocytes, thereby keeping its levels high. SGK2 phosphorylation of PDZK1 would inhibit is interaction with SR-BI (similar to the role SGK1 plays in inhibiting the interaction of Nedd4-2 with ENaC). Expression of SGK2 leads to increased expression of Na transporters on the apical membrane, thereby diminishing the sodium gradient. Since the sodium gradient drives bile transport, reduced bile flow occurs and cholesterol accumulates. Thus inhibiting SGK2 will increase SR-BI levels in the liver and therefore increase reverse cholesterol transport. Also, inhibition of SGK2 should lead to increased bile flow and a concomitant decrease in total plasma cholesterol. This would decrease plasma cholesterol levels.

[0282] Thus, inhibitors of 54946 can be used to ameliorate cardiovascular disease, including but not limited to atherosclerosis. 54946 polypeptides of the present invention would be useful in screening for modulators of 54946 activity.

[0283] Gene ID 2419

[0284] The human 2419 sequence (SEQ ID NO:127), known as human Chemokine receptor-like 1 (CML1) or G-protein coupled receptor DEZ or ChemR23, is approximately 1900 nucleotides long including untranslated regions. The coding sequence, located at about nucleic acids 514 to 1629 of SEQ ID NO:127, encodes a 371 amino acid protein (SEQ ID NO:128).

[0285] As assessed by TaqMan analysis using a human tissue panel, 2419 mRNA is expressed in a variety of human tissues, with the highest expression seen in arteries and veins, heart, colon and breast tumors, skin and CNS structures. Additionally, 2419 mRNA is expressed in cultured endothelial cells and primary osteoblasts. In rats treated with antihypertensive agents for three or twenty-eight days, expression of 2419 is subtly up-regulated in aortas compared to vehicle-treated controls. In spontaneously hypertensive rats (SHR), there is a significant (t-test, p<0.05) up-regulation of 2419 mRNA in aortas of the SHR and SHR stroke-prone strains at 15 weeks of age compared to Wistar Kyoto normotensive age-matched controls. In addition, the ligand chemerin is highly expressed in both rat and human vessels.

[0286] 2419 is a recently de-orphaned Gi-coupled GPCR known as DEZ or ChemR23 which is activated by the ligand chemerin (Wittamer et al., J. Exp. Med., 198: 977-985 (2003); and Methner, et al., Biochem. Biophys. Res. Commun. 233: 336-342 (1997)). Chemerin is a novel protein which is encoded by the Tig-2 (tazarotene induced gene. It is secreted as a precursor with low activity; proteolytic cleavage of C-terminus produces potent, highly selective agonist of ChemR23. Chemerin is an extracellular protein which is expressed in human ascitic fluid and inflammatory samples at ng/ml concentrations. 2419 has high homology to several neuropeptide and chemoattractant receptors, such as the angiotensin II and C5a anaphylatoxin receptors. Activation of the 2419 receptor by chemerin was shown to promote calcium mobilization and chemotaxis of dendritic cells and macrophages (Wittamer et al., J. Exp. Med., 198: 977-985 (2003)). Our expression and regulation data suggest that antagonism of this GPCR will result in a beneficial effect by reducing well known vasoconstrictor signaling cascades (i.e. intracellular calcium elevations, p42/44 MAPK activation and cAMP levels). The expression of 2419 is enhanced in hypertensive states and expressed in relevant tissues involved in blood pressure maintenance (veins, arteries, kidney and skeletal muscle). Thus, inhibitors of 2419 can be used to ameliorate cardiovascular disease, including but not limited to atherosclerosis. 2419 polypeptides of the present invention would be useful in screening for modulators of 2419 activity.

[0287] Various aspects of the invention are described in further detail in the following subsections:

[0288] I. Screening Assays:

[0289] The invention provides a method (also referred to herein as a “screening assay”) for identifying modulators, i.e., candidate or test compounds or agents (e.g., peptides, peptidomimetics, small molecules (organic or inorganic) or other drugs) which bind to 1722, 10280, 59917, 85553, 10653, 9235, 21668, 17794, 2210, 6169, 10102, 21061, 17662, 1468, 12282, 6350, 9035, 1820, 23652, 7301, 8925, 8701, 3533, 9462, 9123, 12788, 17729, 65552, 1261, 21476, 33770, 9380, 2569654, 33556, 53656, 44143, 32612, 10671, 261, 44570, 41922, 2552, 2417, 19319, 43969, 8921, 8993, 955, 32345, 966, 1920, 17318, 1510, 14180, 26005, 554, 16408, 42028, 112091, 13886, 13942, 1673, 54946 or 2419 proteins, have a stimulatory or inhibitory effect on, for example, 1722, 10280, 59917, 85553, 10653, 9235, 21668, 17794, 2210, 6169, 10102, 21061, 17662, 1468, 12282, 6350, 9035, 1820, 23652, 7301, 8925, 8701, 3533, 9462, 9123, 12788, 17729, 65552, 1261, 21476, 33770, 9380, 2569654, 33556, 53656, 44143, 32612, 10671, 261, 44570, 41922, 2552, 2417, 19319, 43969, 8921, 8993, 955, 32345, 966, 1920, 17318, 1510, 14180, 26005, 554, 16408, 42028, 112091, 13886, 13942, 1673, 54946 or 2419 expression or 1722, 10280, 59917, 85553, 10653, 9235, 21668, 17794, 2210, 6169, 10102, 21061, 17662, 1468, 12282, 6350, 9035, 1820, 23652, 7301, 8925, 8701, 3533, 9462, 9123, 12788, 17729, 65552, 1261, 21476, 33770, 9380, 2569654, 33556, 53656, 44143, 32612, 10671, 261, 44570, 41922, 2552, 2417, 19319, 43969, 8921, 8993, 955, 32345, 966, 1920, 17318, 1510, 14180, 26005, 554, 16408, 42028, 112091, 13886, 13942, 1673, 54946 or 2419 activity, or have a stimulatory or inhibitory effect on, for example, the expression or activity of a 1722, 10280, 59917, 85553, 10653, 9235, 21668, 17794, 2210, 6169, 10102, 21061, 17662, 1468, 12282, 6350, 9035, 1820, 23652, 7301, 8925, 8701, 3533, 9462, 9123, 12788, 17729, 65552, 1261, 21476, 33770, 9380, 2569654, 33556, 53656, 44143, 32612, 10671, 261, 44570, 41922, 2552, 2417, 19319, 43969, 8921, 8993, 955, 32345, 966, 1920, 17318, 1510, 14180, 26005, 554, 16408, 42028, 112091, 13886, 13942, 1673, 54946 or 2419 substrate. Compounds identified using the assays described herein may be useful for treating cardiovascular diseases, e.g., atherosclerosis and/or thrombosis.

[0290] These assays are designed to identify compounds that bind to a 1722, 10280, 59917, 85553, 10653, 9235, 21668, 17794, 2210, 6169, 10102, 21061, 17662, 1468, 12282, 6350, 9035, 1820, 23652, 7301, 8925, 8701, 3533, 9462, 9123, 12788, 17729, 65552, 1261, 21476, 33770, 9380, 2569654, 33556, 53656, 44143, 32612, 10671, 261, 44570, 41922, 2552, 2417, 19319, 43969, 8921, 8993, 955, 32345, 966, 1920, 17318, 1510, 14180, 26005, 554, 16408, 42028, 112091, 13886, 13942, 1673, 54946 or 2419 protein, bind to other intracellular or extracellular proteins that interact with a 1722, 10280, 59917, 85553, 10653, 9235, 21668, 17794, 2210, 6169, 10102, 21061, 17662, 1468, 12282, 6350, 9035, 1820, 23652, 7301, 8925, 8701, 3533, 9462, 9123, 12788, 17729, 65552, 1261, 21476, 33770, 9380, 2569654, 33556, 53656, 44143, 32612, 10671, 261, 44570, 41922, 2552, 2417, 19319, 43969, 8921, 8993, 955, 32345, 966, 1920, 17318, 1510, 14180, 26005, 554, 16408, 42028, 112091, 13886, 13942, 1673, 54946 or 2419 protein, and interfere with the interaction of the 1722, 10280, 59917, 85553, 10653, 9235, 21668, 17794, 2210, 6169, 10102, 21061, 17662, 1468, 12282, 6350, 9035, 1820, 23652, 7301, 8925, 8701, 3533, 9462, 9123, 12788, 17729, 65552, 1261, 21476, 33770, 9380, 2569654, 33556, 53656, 44143, 32612, 10671, 261, 44570, 41922, 2552, 2417, 19319, 43969, 8921, 8993, 955, 32345, 966, 1920, 17318, 1510, 14180, 26005, 554, 16408, 42028, 112091, 13886, 13942, 1673, 54946 or 2419 protein with other intercellular or extracellular proteins. For example, in the case of the 1722, 10280, 59917, 85553, 10653, 9235, 21668, 17794, 2210, 6169, 10102, 21061, 17662, 1468, 12282, 6350, 9035, 1820, 23652, 7301, 8925, 8701, 3533, 9462, 9123, 12788, 17729, 65552, 1261, 21476, 33770, 9380, 2569654, 33556, 53656, 44143, 32612, 10671, 261, 44570, 41922, 2552, 2417, 19319, 43969, 8921, 8993, 955, 32345, 966, 1920, 17318, 1510, 14180, 26005, 554, 16408, 42028, 112091, 13886, 13942, 1673, 54946 or 2419 protein, which is a transmembrane receptor-type protein, such techniques can identify ligands for such a receptor. A 1722, 10280, 59917, 85553, 10653, 9235, 21668, 17794, 2210, 6169, 10102, 21061, 17662, 1468, 12282, 6350, 9035, 1820, 23652, 7301, 8925, 8701, 3533, 9462, 9123, 12788, 17729, 65552, 1261, 21476, 33770, 9380, 2569654, 33556, 53656, 44143, 32612, 10671, 261, 44570, 41922, 2552, 2417, 19319, 43969, 8921, 8993, 955, 32345, 966, 1920, 17318, 1510, 14180, 26005, 554, 16408, 42028, 112091, 13886, 13942, 1673, 54946 or 2419 protein ligand or substrate can, for example, be used to ameliorate cardiovascular diseases, e.g., atherosclerosis, ischemia/reperfusion, hypertension, restenosis, arterial inflammation, thrombosis and endothelial cell disorders. Such compounds may include, but are not limited to peptides, antibodies, or small organic or inorganic compounds. Such compounds may also include other cellular proteins.

[0291] Compounds identified via assays such as those described herein may be useful, for example, for ameliorating cardiovascular disease, e.g., athersclerosis and/or thrombosis. In instances whereby a cardiovascular disease condition results from an overall lower level of 1722, 10280, 59917, 85553, 10653, 9235, 21668, 17794, 2210, 6169, 10102, 21061, 17662, 1468, 12282, 6350, 9035, 1820, 23652, 7301, 8925, 8701, 3533, 9462, 9123, 12788, 17729, 65552, 1261, 21476, 33770, 9380, 2569654, 33556, 53656, 44143, 32612, 10671, 261, 44570, 41922, 2552, 2417, 19319, 43969, 8921, 8993, 955, 32345, 966, 1920, 17318, 1510, 14180, 26005, 554, 16408, 42028, 112091, 13886, 13942, 1673, 54946 or 2419 gene expression and/or 1722, 10280, 59917, 85553, 10653, 9235, 21668, 17794, 2210, 6169, 10102, 21061, 17662, 1468, 12282, 6350, 9035, 1820, 23652, 7301, 8925, 8701, 3533, 9462, 9123, 12788, 17729, 65552, 1261, 21476, 33770, 9380, 2569654, 33556, 53656, 44143, 32612, 10671, 261, 44570, 41922, 2552, 2417, 19319, 43969, 8921, 8993, 955, 32345, 966, 1920, 17318, 1510, 14180, 26005, 554, 16408, 42028, 112091, 13886, 13942, 1673, 54946 or 2419 protein in a cell or tissue, compounds that interact with the 1722, 10280, 59917, 85553, 10653, 9235, 21668, 17794, 2210, 6169, 10102, 21061, 17662, 1468, 12282, 6350, 9035, 1820, 23652, 7301, 8925, 8701, 3533, 9462, 9123, 12788, 17729, 65552, 1261, 21476, 33770, 9380, 2569654, 33556, 53656, 44143, 32612, 10671, 261, 44570, 41922, 2552, 2417, 19319, 43969, 8921, 8993, 955, 32345, 966, 1920, 17318, 1510, 14180, 26005, 554, 16408, 42028, 112091, 13886, 13942, 1673, 54946 or 2419 protein may include compounds which accentuate or amplify the activity of the bound 1722, 10280, 59917, 85553, 10653, 9235, 21668, 17794, 2210, 6169, 10102, 21061, 17662, 1468, 12282, 6350, 9035, 1820, 23652, 7301, 8925, 8701, 3533, 9462, 9123, 12788, 17729, 65552, 1261, 21476, 33770, 9380, 2569654, 33556, 53656, 44143, 32612, 10671, 261, 44570, 41922, 2552, 2417, 19319, 43969, 8921, 8993, 955, 32345, 966, 1920, 17318, 1510, 14180, 26005, 554, 16408, 42028, 112091, 13886, 13942, 1673, 54946 or 2419 protein. Such compounds would bring about an effective increase in the level of 1722, 10280, 59917, 85553, 10653, 9235, 21668, 17794, 2210, 6169, 10102, 21061, 17662, 1468, 12282, 6350, 9035, 1820, 23652, 7301, 8925, 8701, 3533, 9462, 9123, 12788, 17729, 65552, 1261, 21476, 33770, 9380, 2569654, 33556, 53656, 44143, 32612, 10671, 261, 44570, 41922, 2552, 2417, 19319, 43969, 8921, 8993, 955, 32345, 966, 1920, 17318, 1510, 14180, 26005, 554, 16408, 42028, 112091, 13886, 13942, 1673, 54946 or 2419 protein activity, thus ameliorating symptoms.

[0292] In other instances, mutations within the 1722, 10280, 59917, 85553, 10653, 9235, 21668, 17794, 2210, 6169, 10102, 21061, 17662, 1468, 12282, 6350, 9035, 1820, 23652, 7301, 8925, 8701, 3533, 9462, 9123, 12788, 17729, 65552, 1261, 21476, 33770, 9380, 2569654, 33556, 53656, 44143, 32612, 10671, 261, 44570, 41922, 2552, 2417, 19319, 43969, 8921, 8993, 955, 32345, 966, 1920, 17318, 1510, 14180, 26005, 554, 16408, 42028, 112091, 13886, 13942, 1673, 54946 or 2419 gene may cause aberrant types or excessive amounts of 1722, 10280, 59917, 85553, 10653, 9235, 21668, 17794, 2210, 6169, 10102, 21061, 17662, 1468, 12282, 6350, 9035, 1820, 23652, 7301, 8925, 8701, 3533, 9462, 9123, 12788, 17729, 65552, 1261, 21476, 33770, 9380, 2569654, 33556, 53656, 44143, 32612, 10671, 261, 44570, 41922, 2552, 2417, 19319, 43969, 8921, 8993, 955, 32345, 966, 1920, 17318, 1510, 14180, 26005, 554, 16408, 42028, 112091, 13886, 13942, 1673, 54946 or 2419 proteins to be made which have a deleterious effect that leads to a cardiovascular disease. Similarly, physiological conditions may cause an excessive increase in 1722, 10280, 59917, 85553, 10653, 9235, 21668, 17794, 2210, 6169, 10102, 21061, 17662, 1468, 12282, 6350, 9035, 1820, 23652, 7301, 8925, 8701, 3533, 9462, 9123, 12788, 17729, 65552, 1261, 21476, 33770, 9380, 2569654, 33556, 53656, 44143, 32612, 10671, 261, 44570, 41922, 2552, 2417, 19319, 43969, 8921, 8993, 955, 32345, 966, 1920, 17318, 1510, 14180, 26005, 554, 16408, 42028, 112091, 13886, 13942, 1673, 54946 or 2419 gene expression leading to a cardiovascular disease. In such cases, compounds that bind to a 1722, 10280, 59917, 85553, 10653, 9235, 21668, 17794, 2210, 6169, 10102, 21061, 17662, 1468, 12282, 6350, 9035, 1820, 23652, 7301, 8925, 8701, 3533, 9462, 9123, 12788, 17729, 65552, 1261, 21476, 33770, 9380, 2569654, 33556, 53656, 44143, 32612, 10671, 261, 44570, 41922, 2552, 2417, 19319, 43969, 8921, 8993, 955, 32345, 966, 1920, 17318, 1510, 14180, 26005, 554, 16408, 42028, 112091, 13886, 13942, 1673, 54946 or 2419 protein may be identified that inhibit the activity of the 1722, 10280, 59917, 85553, 10653, 9235, 21668, 17794, 2210, 6169, 10102, 21061, 17662, 1468, 12282, 6350, 9035, 1820, 23652, 7301, 8925, 8701, 3533, 9462, 9123, 12788, 17729, 65552, 1261, 21476, 33770, 9380, 2569654, 33556, 53656, 44143, 32612, 10671, 261, 44570, 41922, 2552, 2417, 19319, 43969, 8921, 8993, 955, 32345, 966, 1920, 17318, 1510, 14180, 26005, 554, 16408, 42028, 112091, 13886, 13942, 1673, 54946 or 2419 protein. Assays for testing the effectiveness of compounds identified by techniques such as those described in this section are discussed herein.

[0293] In one embodiment, the invention provides assays for screening candidate or test compounds which are substrates of a 1722, 10280, 59917, 85553, 10653, 9235, 21668, 17794, 2210, 6169, 10102, 21061, 17662, 1468, 12282, 6350, 9035, 1820, 23652, 7301, 8925, 8701, 3533, 9462, 9123, 12788, 17729, 65552, 1261, 21476, 33770, 9380, 2569654, 33556, 53656, 44143, 32612, 10671, 261, 44570, 41922, 2552, 2417, 19319, 43969, 8921, 8993, 955, 32345, 966, 1920, 17318, 1510, 14180, 26005, 554, 16408, 42028, 112091, 13886, 13942, 1673, 54946 or 2419 protein or polypeptide or biologically active portion thereof. In another embodiment, the invention provides assays for screening candidate or test compounds which bind to or modulate the activity of a 1722, 10280, 59917, 85553, 10653, 9235, 21668, 17794, 2210, 6169, 10102, 21061, 17662, 1468, 12282, 6350, 9035, 1820, 23652, 7301, 8925, 8701, 3533, 9462, 9123, 12788, 17729, 65552, 1261, 21476, 33770, 9380, 2569654, 33556, 53656, 44143, 32612, 10671, 261, 44570, 41922, 2552, 2417, 19319, 43969, 8921, 8993, 955, 32345, 966, 1920, 17318, 1510, 14180, 26005, 554, 16408, 42028, 112091, 13886, 13942, 1673, 54946 or 2419 protein or polypeptide or biologically active portion thereof. The test compounds of the present invention can be obtained using any of the numerous approaches in combinatorial library methods known in the art, including: biological libraries; spatially addressable parallel solid phase or solution phase libraries; synthetic library methods requiring deconvolution; the ‘one-bead one-compound’ library method; and synthetic library methods using affinity chromatography selection. The biological library approach is limited to peptide libraries, while the other four approaches are applicable to peptide, non-peptide oligomer or small molecule libraries of compounds (Lam, K.S. (1997) Anticancer Drug Des. 12:145).

[0294] Examples of methods for the synthesis of molecular libraries can be found in the art, for example in: DeWitt et al. (1993) Proc. Natl. Acad. Sci. U.S.A. 90:6909; Erb et al. (1994) Proc. Natl. Acad. Sci. USA 91:11422; Zuckermann et al. (1994). J. Med. Chem. 37:2678; Cho et al. (1993) Science 261:1303; Carrell et al. (1994) Angew. Chem. Int. Ed. Engl. 33:2059; Carell et al. (1994) Angew. Chem. Int. Ed. Engl. 33:2061; and in Gallop et al. (1994) J. Med. Chem. 37:1233.

[0295] Libraries of compounds may be presented in solution (e.g., Houghten (1992) Biotechniques 13:412-421), or on beads (Lam (1991) Nature 354:82-84), chips (Fodor (1993) Nature 364:555-556), bacteria (Ladner U.S. Pat. No. 5,223,409), spores (Ladner U.S. Pat. No. '409), plasmids (Cull et al. (1992) Proc Natl Acad Sci USA 89:1865-1869) or on phage (Scott and Smith (1990) Science 249:386-390); (Devlin (1990) Science 249:404-406); (Cwirla et al. (1990) Proc. Natl. Acad. Sci. 87:6378-6382); (Felici (1991) J. Mol. Biol. 222:301-310); (Ladner supra.).

[0296] In one embodiment, an assay is a cell-based assay in which a cell which expresses a 1722, 10280, 59917, 85553, 10653, 9235, 21668, 17794, 2210, 6169, 10102, 21061, 17662, 1468, 12282, 6350, 9035, 1820, 23652, 7301, 8925, 8701, 3533, 9462, 9123, 12788, 17729, 65552, 1261, 21476, 33770, 9380, 2569654, 33556, 53656, 44143, 32612, 10671, 261, 44570, 41922, 2552, 2417, 19319, 43969, 8921, 8993, 955, 32345, 966, 1920, 17318, 1510, 14180, 26005, 554, 16408, 42028, 112091, 13886, 13942, 1673, 54946 or 2419 protein or biologically active portion thereof is contacted with a test compound and the ability of the test compound to modulate 1722, 10280, 59917, 85553, 10653, 9235, 21668, 17794, 2210, 6169, 10102, 21061, 17662, 1468, 12282, 6350, 9035, 1820, 23652, 7301, 8925, 8701, 3533, 9462, 9123, 12788, 17729, 65552, 1261, 21476, 33770, 9380, 2569654, 33556, 53656, 44143, 32612, 10671, 261, 44570, 41922, 2552, 2417, 19319, 43969, 8921, 8993, 955, 32345, 966, 1920, 17318, 1510, 14180, 26005, 554, 16408, 42028, 112091, 13886, 13942, 1673, 54946 or 2419 activity is determined. Determining the ability of the test compound to modulate 1722, 10280, 59917, 85553, 10653, 9235, 21668, 17794, 2210, 6169, 10102, 21061, 17662, 1468, 12282, 6350, 9035, 1820, 23652, 7301, 8925, 8701, 3533, 9462, 9123, 12788, 17729, 65552, 1261, 21476, 33770, 9380, 2569654, 33556, 53656, 44143, 32612, 10671, 261, 44570, 41922, 2552, 2417, 19319, 43969, 8921, 8993, 955, 32345, 966, 1920, 17318, 1510, 14180, 26005, 554, 16408, 42028, 112091, 13886, 13942, 1673, 54946 or 2419 activity can be accomplished by monitoring, for example, intracellular calcium, IP₃, cAMP, or diacylglycerol concentration, the phosphorylation profile of intracellular proteins, cell proliferation and/or migration, gene expression of, for example, cell surface adhesion molecules or genes associated with angiogenesis, or the activity of a 1722, 10280, 59917, 85553, 10653, 9235, 21668, 17794, 2210, 6169, 10102, 21061, 17662, 1468, 12282, 6350, 9035, 1820, 23652, 7301, 8925, 8701, 3533, 9462, 9123, 12788, 17729, 65552, 1261, 21476, 33770, 9380, 2569654, 33556, 53656, 44143, 32612, 10671, 261, 44570, 41922, 2552, 2417, 19319, 43969, 8921, 8993, 955, 32345, 966, 1920, 17318, 1510, 14180, 26005, 554, 16408, 42028, 112091, 13886, 13942, 1673, 54946 or 2419 regulated transcription factor. The cell can be of mammalian origin, e.g., an endothelial cell. In one embodiment, compounds that interact with a receptor domain can be screened for their ability to function as ligands, i.e., to bind to the receptor and modulate a signal transduction pathway. Identification of ligands, and measuring the activity of the ligand-receptor complex, leads to the identification of modulators (e.g., antagonists) of this interaction. Such modulators may be useful in the treatment of cardiovascular disease.

[0297] The ability of the test compound to modulate 1722, 10280, 59917, 85553, 10653, 9235, 21668, 17794, 2210, 6169, 10102, 21061, 17662, 1468, 12282, 6350, 9035, 1820, 23652, 7301, 8925, 8701, 3533, 9462, 9123, 12788, 17729, 65552, 1261, 21476, 33770, 9380, 2569654, 33556, 53656, 44143, 32612, 10671, 261, 44570, 41922, 2552, 2417, 19319, 43969, 8921, 8993, 955, 32345, 966, 1920, 17318, 1510, 14180, 26005, 554, 16408, 42028, 112091, 13886, 13942, 1673, 54946 or 2419 binding to a substrate or to bind to 1722, 10280, 59917, 85553, 10653, 9235, 21668, 17794, 2210, 6169, 10102, 21061, 17662, 1468, 12282, 6350, 9035, 1820, 23652, 7301, 8925, 8701, 3533, 9462, 9123, 12788, 17729, 65552, 1261, 21476, 33770, 9380, 2569654, 33556, 53656, 44143, 32612, 10671, 261, 44570, 41922, 2552, 2417, 19319, 43969, 8921, 8993, 955, 32345, 966, 1920, 17318, 1510, 14180, 26005, 554, 16408, 42028, 112091, 13886, 13942, 1673, 54946 or 2419 can also be determined. Determining the ability of the test compound to modulate 1722, 10280, 59917, 85553, 10653, 9235, 21668, 17794, 2210, 6169, 10102, 21061, 17662, 1468, 12282, 6350, 9035, 1820, 23652, 7301, 8925, 8701, 3533, 9462, 9123, 12788, 17729, 65552, 1261, 21476, 33770, 9380, 2569654, 33556, 53656, 44143, 32612, 10671, 261, 44570, 41922, 2552, 2417, 19319, 43969, 8921, 8993, 955, 32345, 966, 1920, 17318, 1510, 14180, 26005, 554, 16408, 42028, 112091, 13886, 13942, 1673, 54946 or 2419 binding to a substrate can be accomplished, for example, by coupling the 1722, 10280, 59917, 85553, 10653, 9235, 21668, 17794, 2210, 6169, 10102, 21061, 17662, 1468, 12282, 6350, 9035, 1820, 23652, 7301, 8925, 8701, 3533, 9462, 9123, 12788, 17729, 65552, 1261, 21476, 33770, 9380, 2569654, 33556, 53656, 44143, 32612, 10671, 261, 44570, 41922, 2552, 2417, 19319, 43969, 8921, 8993, 955, 32345, 966, 1920, 17318, 1510, 14180, 26005, 554, 16408, 42028, 112091, 13886, 13942, 1673, 54946 or 2419 substrate with a radioisotope or enzymatic label such that binding of the 1722, 10280, 59917, 85553, 10653, 9235, 21668, 17794, 2210, 6169, 10102, 21061, 17662, 1468, 12282, 6350, 9035, 1820, 23652, 7301, 8925, 8701, 3533, 9462, 9123, 12788, 17729, 65552, 1261, 21476, 33770, 9380, 2569654, 33556, 53656, 44143, 32612, 10671, 261, 44570, 41922, 2552, 2417, 19319, 43969, 8921, 8993, 955, 32345, 966, 1920, 17318, 1510, 14180, 26005, 554, 16408, 42028, 112091, 13886, 13942, 1673, 54946 or 2419 substrate to 1722, 10280, 59917, 85553, 10653, 9235, 21668, 17794, 2210, 6169, 10102, 21061, 17662, 1468, 12282, 6350, 9035, 1820, 23652, 7301, 8925, 8701, 3533, 9462, 9123, 12788, 17729, 65552, 1261, 21476, 33770, 9380, 2569654, 33556, 53656, 44143, 32612, 10671, 261, 44570, 41922, 2552, 2417, 19319, 43969, 8921, 8993, 955, 32345, 966, 1920, 17318, 1510, 14180, 26005, 554, 16408, 42028, 112091, 13886, 13942, 1673, 54946 or 2419 can be determined by detecting the labeled 1722, 10280, 59917, 85553, 10653, 9235, 21668, 17794, 2210, 6169, 10102, 21061, 17662, 1468, 12282, 6350, 9035, 1820, 23652, 7301, 8925, 8701, 3533, 9462, 9123, 12788, 17729, 65552, 1261, 21476, 33770, 9380, 2569654, 33556, 53656, 44143, 32612, 10671, 261, 44570, 41922, 2552, 2417, 19319, 43969, 8921, 8993, 955, 32345, 966, 1920, 17318, 1510, 14180, 26005, 554, 16408, 42028, 112091, 13886, 13942, 1673, 54946 or 2419 substrate in a complex. 1722, 10280, 59917, 85553, 10653, 9235, 21668, 17794, 2210, 6169, 10102, 21061, 17662, 1468, 12282, 6350, 9035, 1820, 23652, 7301, 8925, 8701, 3533, 9462, 9123, 12788, 17729, 65552, 1261, 21476, 33770, 9380, 2569654, 33556, 53656, 44143, 32612, 10671, 261, 44570, 41922, 2552, 2417, 19319, 43969, 8921, 8993, 955, 32345, 966, 1920, 17318, 1510, 14180, 26005, 554, 16408, 42028, 112091, 13886, 13942, 1673, 54946 or 2419 could also be coupled with a radioisotope or enzymatic label to monitor the ability of a test compound to modulate 1722, 10280, 59917, 85553, 10653, 9235, 21668, 17794, 2210, 6169, 10102, 21061, 17662, 1468, 12282, 6350, 9035, 1820, 23652, 7301, 8925, 8701, 3533, 9462, 9123, 12788, 17729, 65552, 1261, 21476, 33770, 9380, 2569654, 33556, 53656, 44143, 32612, 10671, 261, 44570, 41922, 2552, 2417, 19319, 43969, 8921, 8993, 955, 32345, 966, 1920, 17318, 1510, 14180, 26005, 554, 16408, 42028, 112091, 13886, 13942, 1673, 54946 or 2419 binding to a 1722, 10280, 59917, 85553, 10653, 9235, 21668, 17794, 2210, 6169, 10102, 21061, 17662, 1468, 12282, 6350, 9035, 1820, 23652, 7301, 8925, 8701, 3533, 9462, 9123, 12788, 17729, 65552, 1261, 21476, 33770, 9380, 2569654, 33556, 53656, 44143, 32612, 10671, 261, 44570, 41922, 2552, 2417, 19319, 43969, 8921, 8993, 955, 32345, 966, 1920, 17318, 1510, 14180, 26005, 554, 16408, 42028, 112091, 13886, 13942, 1673, 54946 or 2419 substrate in a complex. Determining the ability of the test compound to bind 1722, 10280, 59917, 85553, 10653, 9235, 21668, 17794, 2210, 6169, 10102, 21061, 17662, 1468, 12282, 6350, 9035, 1820, 23652, 7301, 8925, 8701, 3533, 9462, 9123, 12788, 17729, 65552, 1261, 21476, 33770, 9380, 2569654, 33556, 53656, 44143, 32612, 10671, 261, 44570, 41922, 2552, 2417, 19319, 43969, 8921, 8993, 955, 32345, 966, 1920, 17318, 1510, 14180, 26005, 554, 16408, 42028, 112091, 13886, 13942, 1673, 54946 or 2419 can be accomplished, for example, by coupling the compound with a radioisotope or enzymatic label such that binding of the compound to 1722, 10280, 59917, 85553, 10653, 9235, 21668, 17794, 2210, 6169, 10102, 21061, 17662, 1468, 12282, 6350, 9035, 1820, 23652, 7301, 8925, 8701, 3533, 9462, 9123, 12788, 17729, 65552, 1261, 21476, 33770, 9380, 2569654, 33556, 53656, 44143, 32612, 10671, 261, 44570, 41922, 2552, 2417, 19319, 43969, 8921, 8993, 955, 32345, 966, 1920, 17318, 1510, 14180, 26005, 554, 16408, 42028, 112091, 13886, 13942, 1673, 54946 or 2419 can be determined by detecting the labeled 1722, 10280, 59917, 85553, 10653, 9235, 21668, 17794, 2210, 6169, 10102, 21061, 17662, 1468, 12282, 6350, 9035, 1820, 23652, 7301, 8925, 8701, 3533, 9462, 9123, 12788, 17729, 65552, 1261, 21476, 33770, 9380, 2569654, 33556, 53656, 44143, 32612, 10671, 261, 44570, 41922, 2552, 2417, 19319, 43969, 8921, 8993, 955, 32345, 966, 1920, 17318, 1510, 14180, 26005, 554, 16408, 42028, 112091, 13886, 13942, 1673, 54946 or 2419 compound in a complex. For example, compounds (e.g., 1722, 10280, 59917, 85553, 10653, 9235, 21668, 17794, 2210, 6169, 10102, 21061, 17662, 1468, 12282, 6350, 9035, 1820, 23652, 7301, 8925, 8701, 3533, 9462, 9123, 12788, 17729, 65552, 1261, 21476, 33770, 9380, 2569654, 33556, 53656, 44143, 32612, 10671, 261, 44570, 41922, 2552, 2417, 19319, 43969, 8921, 8993, 955, 32345, 966, 1920, 17318, 1510, 14180, 26005, 554, 16408, 42028, 112091, 13886, 13942, 1673, 54946 or 2419 ligands or substrates) can be labeled with ¹²⁵I, ³⁵S, ¹⁴C, or ³H, either directly or indirectly, and the radioisotope detected by direct counting of radioemmission or by scintillation counting. Compounds can further be enzymatically labeled with, for example, horseradish peroxidase, alkaline phosphatase, or luciferase, and the enzymatic label detected by determination of conversion of an appropriate substrate to product.

[0298] It is also within the scope of this invention to determine the ability of a compound (e.g., a 1722, 10280, 59917, 85553, 10653, 9235, 21668, 17794, 2210, 6169, 10102, 21061, 17662, 1468, 12282, 6350, 9035, 1820, 23652, 7301, 8925, 8701, 3533, 9462, 9123, 12788, 17729, 65552, 1261, 21476, 33770, 9380, 2569654, 33556, 53656, 44143, 32612, 10671, 261, 44570, 41922, 2552, 2417, 19319, 43969, 8921, 8993, 955, 32345, 966, 1920, 17318, 1510, 14180, 26005, 554, 16408, 42028, 112091, 13886, 13942, 1673, 54946 or 2419 ligand or substrate) to interact with 1722, 10280, 59917, 85553, 10653, 9235, 21668, 17794, 2210, 6169, 10102, 21061, 17662, 1468, 12282, 6350, 9035, 1820, 23652, 7301, 8925, 8701, 3533, 9462, 9123, 12788, 17729, 65552, 1261, 21476, 33770, 9380, 2569654, 33556, 53656, 44143, 32612, 10671, 261, 44570, 41922, 2552, 2417, 19319, 43969, 8921, 8993, 955, 32345, 966, 1920, 17318, 1510, 14180, 26005, 554, 16408, 42028, 112091, 13886, 13942, 1673, 54946 or 2419 without the labeling of any of the interactants. For example, a microphysiometer can be used to detect the interaction of a compound with 1722, 10280, 59917, 85553, 10653, 9235, 21668, 17794, 2210, 6169, 10102, 21061, 17662, 1468, 12282, 6350, 9035, 1820, 23652, 7301, 8925, 8701, 3533, 9462, 9123, 12788, 17729, 65552, 1261, 21476, 33770, 9380, 2569654, 33556, 53656, 44143, 32612, 10671, 261, 44570, 41922, 2552, 2417, 19319, 43969, 8921, 8993, 955, 32345, 966, 1920, 17318, 1510, 14180, 26005, 554, 16408, 42028, 112091, 13886, 13942, 1673, 54946 or 2419 without the labeling of either the compound or the 1722, 10280, 59917, 85553, 10653, 9235, 21668, 17794, 2210, 6169, 10102, 21061, 17662, 1468, 12282, 6350, 9035, 1820, 23652, 7301, 8925, 8701, 3533, 9462, 9123, 12788, 17729, 65552, 1261, 21476, 33770, 9380, 2569654, 33556, 53656, 44143, 32612, 10671, 261, 44570, 41922, 2552, 2417, 19319, 43969, 8921, 8993, 955, 32345, 966, 1920, 17318, 1510, 14180, 26005, 554, 16408, 42028, 112091, 13886, 13942, 1673, 54946 or 2419 (McConnell, H. M. et al. (1992) Science 257:1906-1912. As used herein, a “microphysiometer” (e.g., Cytosensor) is an analytical instrument that measures the rate at which a cell acidifies its environment using a light-addressable potentiometric sensor (LAPS). Changes in this acidification rate can be used as an indicator of the interaction between a compound and 1722, 10280, 59917, 85553, 10653, 9235, 21668, 17794, 2210, 6169, 10102, 21061, 17662, 1468, 12282, 6350, 9035, 1820, 23652, 7301, 8925, 8701, 3533, 9462, 9123, 12788, 17729, 65552, 1261, 21476, 33770, 9380, 2569654, 33556, 53656, 44143, 32612, 10671, 261, 44570, 41922, 2552, 2417, 19319, 43969, 8921, 8993, 955, 32345, 966, 1920, 17318, 1510, 14180, 26005, 554, 16408, 42028, 112091, 13886, 13942, 1673, 54946 or 2419.

[0299] In another embodiment, an assay is a cell-based assay comprising contacting a cell expressing a 1722, 10280, 59917, 85553, 10653, 9235, 21668, 17794, 2210, 6169, 10102, 21061, 17662, 1468, 12282, 6350, 9035, 1820, 23652, 7301, 8925, 8701, 3533, 9462, 9123, 12788, 17729, 65552, 1261, 21476, 33770, 9380, 2569654, 33556, 53656, 44143, 32612, 10671, 261, 44570, 41922, 2552, 2417, 19319, 43969, 8921, 8993, 955, 32345, 966, 1920, 17318, 1510, 14180, 26005, 554, 16408, 42028, 112091, 13886, 13942, 1673, 54946 or 2419 target molecule (e.g., a 1722, 10280, 59917, 85553, 10653, 9235, 21668, 17794, 2210, 6169, 10102, 21061, 17662, 1468, 12282, 6350, 9035, 1820, 23652, 7301, 8925, 8701, 3533, 9462, 9123, 12788, 17729, 65552, 1261, 21476, 33770, 9380, 2569654, 33556, 53656, 44143, 32612, 10671, 261, 44570, 41922, 2552, 2417, 19319, 43969, 8921, 8993, 955, 32345, 966, 1920, 17318, 1510, 14180, 26005, 554, 16408, 42028, 112091, 13886, 13942, 1673, 54946 or 2419 substrate) with a test compound and determining the ability of the test compound to modulate (e.g., stimulate or inhibit) the activity of the 1722, 10280, 59917, 85553, 10653, 9235, 21668, 17794, 2210, 6169, 10102, 21061, 17662, 1468, 12282, 6350, 9035, 1820, 23652, 7301, 8925, 8701, 3533, 9462, 9123, 12788, 17729, 65552, 1261, 21476, 33770, 9380, 2569654, 33556, 53656, 44143, 32612, 10671, 261, 44570, 41922, 2552, 2417, 19319, 43969, 8921, 8993, 955, 32345, 966, 1920, 17318, 1510, 14180, 26005, 554, 16408, 42028, 112091, 13886, 13942, 1673, 54946 or 2419 target molecule. Determining the ability of the test compound to modulate the activity of a 1722, 10280, 59917, 85553, 10653, 9235, 21668, 17794, 2210, 6169, 10102, 21061, 17662, 1468, 12282, 6350, 9035, 1820, 23652, 7301, 8925, 8701, 3533, 9462, 9123, 12788, 17729, 65552, 1261, 21476, 33770, 9380, 2569654, 33556, 53656, 44143, 32612, 10671, 261, 44570, 41922, 2552, 2417, 19319, 43969, 8921, 8993, 955, 32345, 966, 1920, 17318, 1510, 14180, 26005, 554, 16408, 42028, 112091, 13886, 13942, 1673, 54946 or 2419 target molecule can be accomplished, for example, by determining the ability of the 1722, 10280, 59917, 85553, 10653, 9235, 21668, 17794, 2210, 6169, 10102, 21061, 17662, 1468, 12282, 6350, 9035, 1820, 23652, 7301, 8925, 8701, 3533, 9462, 9123, 12788, 17729, 65552, 1261, 21476, 33770, 9380, 2569654, 33556, 53656, 44143, 32612, 10671, 261, 44570, 41922, 2552, 2417, 19319, 43969, 8921, 8993, 955, 32345, 966, 1920, 17318, 1510, 14180, 26005, 554, 16408, 42028, 112091, 13886, 13942, 1673, 54946 or 2419 protein to bind to or interact with the 1722, 10280, 59917, 85553, 10653, 9235, 21668, 17794, 2210, 6169, 10102, 21061, 17662, 1468, 12282, 6350, 9035, 1820, 23652, 7301, 8925, 8701, 3533, 9462, 9123, 12788, 17729, 65552, 1261, 21476, 33770, 9380, 2569654, 33556, 53656, 44143, 32612, 10671, 261, 44570, 41922, 2552, 2417, 19319, 43969, 8921, 8993, 955, 32345, 966, 1920, 17318, 1510, 14180, 26005, 554, 16408, 42028, 112091, 13886, 13942, 1673, 54946 or 2419 target molecule.

[0300] Determining the ability of the 1722, 10280, 59917, 85553, 10653, 9235, 21668, 17794, 2210, 6169, 10102, 21061, 17662, 1468, 12282, 6350, 9035, 1820, 23652, 7301, 8925, 8701, 3533, 9462, 9123, 12788, 17729, 65552, 1261, 21476, 33770, 9380, 2569654, 33556, 53656, 44143, 32612, 10671, 261, 44570, 41922, 2552, 2417, 19319, 43969, 8921, 8993, 955, 32345, 966, 1920, 17318, 1510, 14180, 26005, 554, 16408, 42028, 112091, 13886, 13942, 1673, 54946 or 2419 protein or a biologically active fragment thereof, to bind to or interact with a 1722, 10280, 59917, 85553, 10653, 9235, 21668, 17794, 2210, 6169, 10102, 21061, 17662, 1468, 12282, 6350, 9035, 1820, 23652, 7301, 8925, 8701, 3533, 9462, 9123, 12788, 17729, 65552, 1261, 21476, 33770, 9380, 2569654, 33556, 53656, 44143, 32612, 10671, 261, 44570, 41922, 2552, 2417, 19319, 43969, 8921, 8993, 955, 32345, 966, 1920, 17318, 1510, 14180, 26005, 554, 16408, 42028, 112091, 13886, 13942, 1673, 54946 or 2419 target molecule can be accomplished by one of the methods described above for determining direct binding. In a preferred embodiment, determining the ability of the 1722, 10280, 59917, 85553, 10653, 9235, 21668, 17794, 2210, 6169, 10102, 21061, 17662, 1468, 12282, 6350, 9035, 1820, 23652, 7301, 8925, 8701, 3533, 9462, 9123, 12788, 17729, 65552, 1261, 21476, 33770, 9380, 2569654, 33556, 53656, 44143, 32612, 10671, 261, 44570, 41922, 2552, 2417, 19319, 43969, 8921, 8993, 955, 32345, 966, 1920, 17318, 1510, 14180, 26005, 554, 16408, 42028, 112091, 13886, 13942, 1673, 54946 or 2419 protein to bind to or interact with a 1722, 10280, 59917, 85553, 10653, 9235, 21668, 17794, 2210, 6169, 10102, 21061, 17662, 1468, 12282, 6350, 9035, 1820, 23652, 7301, 8925, 8701, 3533, 9462, 9123, 12788, 17729, 65552, 1261, 21476, 33770, 9380, 2569654, 33556, 53656, 44143, 32612, 10671, 261, 44570, 41922, 2552, 2417, 19319, 43969, 8921, 8993, 955, 32345, 966, 1920, 17318, 1510, 14180, 26005, 554, 16408, 42028, 112091, 13886, 13942, 1673, 54946 or 2419 target molecule can be accomplished by determining the activity of the target molecule. For example, the activity of the target molecule can be determined by detecting induction of a cellular second 2+messenger of the target (i.e., intracellular Ca²⁺, diacylglycerol, IP₃, cAMP), detecting catalytic/enzymatic activity of the target on an appropriate substrate, detecting the induction of a reporter gene (comprising a target-responsive regulatory element operatively linked to a nucleic acid encoding a detectable marker, e.g., luciferase), or detecting a target-regulated cellular response (e.g., gene expression).

[0301] In yet another embodiment, an assay of the present invention is a cell-free assay in which a 1722, 10280, 59917, 85553, 10653, 9235, 21668, 17794, 2210, 6169, 10102, 21061, 17662, 1468, 12282, 6350, 9035, 1820, 23652, 7301, 8925, 8701, 3533, 9462, 9123, 12788, 17729, 65552, 1261, 21476, 33770, 9380, 2569654, 33556, 53656, 44143, 32612, 10671, 261, 44570, 41922, 2552, 2417, 19319, 43969, 8921, 8993, 955, 32345, 966, 1920, 17318, 1510, 14180, 26005, 554, 16408, 42028, 112091, 13886, 13942, 1673, 54946 or 2419 protein or biologically active portion thereof, is contacted with a test compound and the ability of the test compound to bind to the 1722, 10280, 59917, 85553, 10653, 9235, 21668, 17794, 2210, 6169, 10102, 21061, 17662, 1468, 12282, 6350, 9035, 1820, 23652, 7301, 8925, 8701, 3533, 9462, 9123, 12788, 17729, 65552, 1261, 21476, 33770, 9380, 2569654, 33556, 53656, 44143, 32612, 10671, 261, 44570, 41922, 2552, 2417, 19319, 43969, 8921, 8993, 955, 32345, 966, 1920, 17318, 1510, 14180, 26005, 554, 16408, 42028, 112091, 13886, 13942, 1673, 54946 or 2419 protein or biologically active portion thereof is determined. Preferred biologically active portions of the 1722, 10280, 59917, 85553, 10653, 9235, 21668, 17794, 2210, 6169, 10102, 21061, 17662, 1468, 12282, 6350, 9035, 1820, 23652, 7301, 8925, 8701, 3533, 9462, 9123, 12788, 17729, 65552, 1261, 21476, 33770, 9380, 2569654, 33556, 53656, 44143, 32612, 10671, 261, 44570, 41922, 2552, 2417, 19319, 43969, 8921, 8993, 955, 32345, 966, 1920, 17318, 1510, 14180, 26005, 554, 16408, 42028, 112091, 13886, 13942, 1673, 54946 or 2419 proteins to be used in assays of the present invention include fragments which participate in interactions with non-1722, 10280, 59917, 85553, 10653, 9235, 21668, 17794, 2210, 6169, 10102, 21061, 17662, 1468, 12282, 6350, 9035, 1820, 23652, 7301, 8925, 8701, 3533, 9462, 9123, 12788, 17729, 65552, 1261, 21476, 33770, 9380, 2569654, 33556, 53656, 44143, 32612, 10671, 261, 44570, 41922, 2552, 2417, 19319, 43969, 8921, 8993, 955, 32345, 966, 1920, 17318, 1510, 14180, 26005, 554, 16408, 42028, 112091, 13886, 13942, 1673, 54946 or 2419 molecules, e.g., fragments with high surface probability scores. Binding of the test compound to the 1722, 10280, 59917, 85553, 10653, 9235, 21668, 17794, 2210, 6169, 10102, 21061, 17662, 1468, 12282, 6350, 9035, 1820, 23652, 7301, 8925, 8701, 3533, 9462, 9123, 12788, 17729, 65552, 1261, 21476, 33770, 9380, 2569654, 33556, 53656, 44143, 32612, 10671, 261, 44570, 41922, 2552, 2417, 19319, 43969, 8921, 8993, 955, 32345, 966, 1920, 17318, 1510, 14180, 26005, 554, 16408, 42028, 112091, 13886, 13942, 1673, 54946 or 2419 protein can be determined either directly or indirectly as described above. In a preferred embodiment, the assay includes contacting the 1722, 10280, 59917, 85553, 10653, 9235, 21668, 17794, 2210, 6169, 10102, 21061, 17662, 1468, 12282, 6350, 9035, 1820, 23652, 7301, 8925, 8701, 3533, 9462, 9123, 12788, 17729, 65552, 1261, 21476, 33770, 9380, 2569654, 33556, 53656, 44143, 32612, 10671, 261, 44570, 41922, 2552, 2417, 19319, 43969, 8921, 8993, 955, 32345, 966, 1920, 17318, 1510, 14180, 26005, 554, 16408, 42028, 112091, 13886, 13942, 1673, 54946 or 2419 protein or biologically active portion thereof with a known compound which binds 1722, 10280, 59917, 85553, 10653, 9235, 21668, 17794, 2210, 6169, 10102, 21061, 17662, 1468, 12282, 6350, 9035, 1820, 23652, 7301, 8925, 8701, 3533, 9462, 9123, 12788, 17729, 65552, 1261, 21476, 33770, 9380, 2569654, 33556, 53656, 44143, 32612, 10671, 261, 44570, 41922, 2552, 2417, 19319, 43969, 8921, 8993, 955, 32345, 966, 1920, 17318, 1510, 14180, 26005, 554, 16408, 42028, 112091, 13886, 13942, 1673, 54946 or 2419 to form an assay mixture, contacting the assay mixture with a test compound, and determining the ability of the test compound to interact with a 1722, 10280, 59917, 85553, 10653, 9235, 21668, 17794, 2210, 6169, 10102, 21061, 17662, 1468, 12282, 6350, 9035, 1820, 23652, 7301, 8925, 8701, 3533, 9462, 9123, 12788, 17729, 65552, 1261, 21476, 33770, 9380, 2569654, 33556, 53656, 44143, 32612, 10671, 261, 44570, 41922, 2552, 2417, 19319, 43969, 8921, 8993, 955, 32345, 966, 1920, 17318, 1510, 14180, 26005, 554, 16408, 42028, 112091, 13886, 13942, 1673, 54946 or 2419 protein, wherein determining the ability of the test compound to interact with a 1722, 10280, 59917, 85553, 10653, 9235, 21668, 17794, 2210, 6169, 10102, 21061, 17662, 1468, 12282, 6350, 9035, 1820, 23652, 7301, 8925, 8701, 3533, 9462, 9123, 12788, 17729, 65552, 1261, 21476, 33770, 9380, 2569654, 33556, 53656, 44143, 32612, 10671, 261, 44570, 41922, 2552, 2417, 19319, 43969, 8921, 8993, 955, 32345, 966, 1920, 17318, 1510, 14180, 26005, 554, 16408, 42028, 112091, 13886, 13942, 1673, 54946 or 2419 protein comprises determining the ability of the test compound to preferentially bind to 1722, 10280, 59917, 85553, 10653, 9235, 21668, 17794, 2210, 6169, 10102, 21061, 17662, 1468, 12282, 6350, 9035, 1820, 23652, 7301, 8925, 8701, 3533, 9462, 9123, 12788, 17729, 65552, 1261, 21476, 33770, 9380, 2569654, 33556, 53656, 44143, 32612, 10671, 261, 44570, 41922, 2552, 2417, 19319, 43969, 8921, 8993, 955, 32345, 966, 1920, 17318, 1510, 14180, 26005, 554, 16408, 42028, 112091, 13886, 13942, 1673, 54946 or 2419 or biologically active portion thereof as compared to the known compound. Compounds that modulate the interaction of 1722, 10280, 59917, 85553, 10653, 9235, 21668, 17794, 2210, 6169, 10102, 21061, 17662, 1468, 12282, 6350, 9035, 1820, 23652, 7301, 8925, 8701, 3533, 9462, 9123, 12788, 17729, 65552, 1261, 21476, 33770, 9380, 2569654, 33556, 53656, 44143, 32612, 10671, 261, 44570, 41922, 2552, 2417, 19319, 43969, 8921, 8993, 955, 32345, 966, 1920, 17318, 1510, 14180, 26005, 554, 16408, 42028, 112091, 13886, 13942, 1673, 54946 or 2419 with a known target protein may be useful in regulating the activity of a 1722, 10280, 59917, 85553, 10653, 9235, 21668, 17794, 2210, 6169, 10102, 21061, 17662, 1468, 12282, 6350, 9035, 1820, 23652, 7301, 8925, 8701, 3533, 9462, 9123, 12788, 17729, 65552, 1261, 21476, 33770, 9380, 2569654, 33556, 53656, 44143, 32612, 10671, 261, 44570, 41922, 2552, 2417, 19319, 43969, 8921, 8993, 955, 32345, 966, 1920, 17318, 1510, 14180, 26005, 554, 16408, 42028, 112091, 13886, 13942, 1673, 54946 or 2419 protein, especially a mutant 1722, 10280, 59917, 85553, 10653, 9235, 21668, 17794, 2210, 6169, 10102, 21061, 17662, 1468, 12282, 6350, 9035, 1820, 23652, 7301, 8925, 8701, 3533, 9462, 9123, 12788, 17729, 65552, 1261, 21476, 33770, 9380, 2569654, 33556, 53656, 44143, 32612, 10671, 261, 44570, 41922, 2552, 2417, 19319, 43969, 8921, 8993, 955, 32345, 966, 1920, 17318, 1510, 14180, 26005, 554, 16408, 42028, 112091, 13886, 13942, 1673, 54946 or 2419 protein.

[0302] In another embodiment, the assay is a cell-free assay in which a 1722, 10280, 59917, 85553, 10653, 9235, 21668, 17794, 2210, 6169, 10102, 21061, 17662, 1468, 12282, 6350, 9035, 1820, 23652, 7301, 8925, 8701, 3533, 9462, 9123, 12788, 17729, 65552, 1261, 21476, 33770, 9380, 2569654, 33556, 53656, 44143, 32612, 10671, 261, 44570, 41922, 2552, 2417, 19319, 43969, 8921, 8993, 955, 32345, 966, 1920, 17318, 1510, 14180, 26005, 554, 16408, 42028, 112091, 13886, 13942, 1673, 54946 or 2419 protein or biologically active portion thereof is contacted with a test compound and the ability of the test compound to modulate (e.g., stimulate or inhibit) the activity of the 1722, 10280, 59917, 85553, 10653, 9235, 21668, 17794, 2210, 6169, 10102, 21061, 17662, 1468, 12282, 6350, 9035, 1820, 23652, 7301, 8925, 8701, 3533, 9462, 9123, 12788, 17729, 65552, 1261, 21476, 33770, 9380, 2569654, 33556, 53656, 44143, 32612, 10671, 261, 44570, 41922, 2552, 2417, 19319, 43969, 8921, 8993, 955, 32345, 966, 1920, 17318, 1510, 14180, 26005, 554, 16408, 42028, 112091, 13886, 13942, 1673, 54946 or 2419 protein or biologically active portion thereof is determined. Determining the ability of the test compound to modulate the activity of a 1722, 10280, 59917, 85553, 10653, 9235, 21668, 17794, 2210, 6169, 10102, 21061, 17662, 1468, 12282, 6350, 9035, 1820, 23652, 7301, 8925, 8701, 3533, 9462, 9123, 12788, 17729, 65552, 1261, 21476, 33770, 9380, 2569654, 33556, 53656, 44143, 32612, 10671, 261, 44570, 41922, 2552, 2417, 19319, 43969, 8921, 8993, 955, 32345, 966, 1920, 17318, 1510, 14180, 26005, 554, 16408, 42028, 112091, 13886, 13942, 1673, 54946 or 2419 protein can be accomplished, for example, by determining the ability of the 1722, 10280, 59917, 85553, 10653, 9235, 21668, 17794, 2210, 6169, 10102, 21061, 17662, 1468, 12282, 6350, 9035, 1820, 23652, 7301, 8925, 8701, 3533, 9462, 9123, 12788, 17729, 65552, 1261, 21476, 33770, 9380, 2569654, 33556, 53656, 44143, 32612, 10671, 261, 44570, 41922, 2552, 2417, 19319, 43969, 8921, 8993, 955, 32345, 966, 1920, 17318, 1510, 14180, 26005, 554, 16408, 42028, 112091, 13886, 13942, 1673, 54946 or 2419 protein to bind to a 1722, 10280, 59917, 85553, 10653, 9235, 21668, 17794, 2210, 6169, 10102, 21061, 17662, 1468, 12282, 6350, 9035, 1820, 23652, 7301, 8925, 8701, 3533, 9462, 9123, 12788, 17729, 65552, 1261, 21476, 33770, 9380, 2569654, 33556, 53656, 44143, 32612, 10671, 261, 44570, 41922, 2552, 2417, 19319, 43969, 8921, 8993, 955, 32345, 966, 1920, 17318, 1510, 14180, 26005, 554, 16408, 42028, 112091, 13886, 13942, 1673, 54946 or 2419 target molecule by one of the methods described above for determining direct binding. Determining the ability of the 1722, 10280, 59917, 85553, 10653, 9235, 21668, 17794, 2210, 6169, 10102, 21061, 17662, 1468, 12282, 6350, 9035, 1820, 23652, 7301, 8925, 8701, 3533, 9462, 9123, 12788, 17729, 65552, 1261, 21476, 33770, 9380, 2569654, 33556, 53656, 44143, 32612, 10671, 261, 44570, 41922, 2552, 2417, 19319, 43969, 8921, 8993, 955, 32345, 966, 1920, 17318, 1510, 14180, 26005, 554, 16408, 42028, 112091, 13886, 13942, 1673, 54946 or 2419 protein to bind to a 1722, 10280, 59917, 85553, 10653, 9235, 21668, 17794, 2210, 6169, 10102, 21061, 17662, 1468, 12282, 6350, 9035, 1820, 23652, 7301, 8925, 8701, 3533, 9462, 9123, 12788, 17729, 65552, 1261, 21476, 33770, 9380, 2569654, 33556, 53656, 44143, 32612, 10671, 261, 44570, 41922, 2552, 2417, 19319, 43969, 8921, 8993, 955, 32345, 966, 1920, 17318, 1510, 14180, 26005, 554, 16408, 42028, 112091, 13886, 13942, 1673, 54946 or 2419 target molecule can also be accomplished using a technology such as real-time Biomolecular Interaction Analysis (BIA) (Sjolander, S. and Urbaniczky, C. (1991) Anal. Chem. 63:2338-2345 and Szabo et al. (1995) Curr. Opin. Struct. Biol. 5:699-705). As used herein, “BIA” is a technology for studying biospecific interactions in real time, without labeling any of the interactants (e.g., BIAcore). Changes in the optical phenomenon of surface plasmon resonance (SPR) can be used as an indication of real-time reactions between biological molecules. In another embodiement, determining the ability of the test compound to bind to a 1722, 10280, 59917, 85553, 10653, 9235, 21668, 17794, 2210, 6169, 10102, 21061, 17662, 1468, 12282, 6350, 9035, 1820, 23652, 7301, 8925, 8701, 3533, 9462, 9123, 12788, 17729, 65552, 1261, 21476, 33770, 9380, 2569654, 33556, 53656, 44143, 32612, 10671, 261, 44570, 41922, 2552, 2417, 19319, 43969, 8921, 8993, 955, 32345, 966, 1920, 17318, 1510, 14180, 26005, 554, 16408, 42028, 112091, 13886, 13942, 1673, 54946 or 2419 target molecule can also be accomplished using an immunoassay, a competition binding assay or a yeast-hybrid assay.

[0303] In another embodiment, determining the ability of the test compound to modulate the activity of a 1722, 10280, 59917, 85553, 10653, 9235, 21668, 17794, 2210, 6169, 10102, 21061, 17662, 1468, 12282, 6350, 9035, 1820, 23652, 7301, 8925, 8701, 3533, 9462, 9123, 12788, 17729, 65552, 1261, 21476, 33770, 9380, 2569654, 33556, 53656, 44143, 32612, 10671, 261, 44570, 41922, 2552, 2417, 19319, 43969, 8921, 8993, 955, 32345, 966, 1920, 17318, 1510, 14180, 26005, 554, 16408, 42028, 112091, 13886, 13942, 1673, 54946 or 2419 protein can be accomplished by determining the ability of the 1722, 10280, 59917, 85553, 10653, 9235, 21668, 17794, 2210, 6169, 10102, 21061, 17662, 1468, 12282, 6350, 9035, 1820, 23652, 7301, 8925, 8701, 3533, 9462, 9123, 12788, 17729, 65552, 1261, 21476, 33770, 9380, 2569654, 33556, 53656, 44143, 32612, 10671, 261, 44570, 41922, 2552, 2417, 19319, 43969, 8921, 8993, 955, 32345, 966, 1920, 17318, 1510, 14180, 26005, 554, 16408, 42028, 112091, 13886, 13942, 1673, 54946 or 2419 protein to further modulate the activity of a downstream effector of a 1722, 10280, 59917, 85553, 10653, 9235, 21668, 17794, 2210, 6169, 10102, 21061, 17662, 1468, 12282, 6350, 9035, 1820, 23652, 7301, 8925, 8701, 3533, 9462, 9123, 12788, 17729, 65552, 1261, 21476, 33770, 9380, 2569654, 33556, 53656, 44143, 32612, 10671, 261, 44570, 41922, 2552, 2417, 19319, 43969, 8921, 8993, 955, 32345, 966, 1920, 17318, 1510, 14180, 26005, 554, 16408, 42028, 112091, 13886, 13942, 1673, 54946 or 2419 target molecule. For example, the activity of the effector molecule on an appropriate target can be determined or the binding of the effector to an appropriate target can be determined as previously described.

[0304] In yet another embodiment, the cell-free assay involves contacting a 1722, 10280, 59917, 85553, 10653, 9235, 21668, 17794, 2210, 6169, 10102, 21061, 17662, 1468, 12282, 6350, 9035, 1820, 23652, 7301, 8925, 8701, 3533, 9462, 9123, 12788, 17729, 65552, 1261, 21476, 33770, 9380, 2569654, 33556, 53656, 44143, 32612, 10671, 261, 44570, 41922, 2552, 2417, 19319, 43969, 8921, 8993, 955, 32345, 966, 1920, 17318, 1510, 14180, 26005, 554, 16408, 42028, 112091, 13886, 13942, 1673, 54946 or 2419 protein or biologically active portion thereof with a known compound which binds the 1722, 10280, 59917, 85553, 10653, 9235, 21668, 17794, 2210, 6169, 10102, 21061, 17662, 1468, 12282, 6350, 9035, 1820, 23652, 7301, 8925, 8701, 3533, 9462, 9123, 12788, 17729, 65552, 1261, 21476, 33770, 9380, 2569654, 33556, 53656, 44143, 32612, 10671, 261, 44570, 41922, 2552, 2417, 19319, 43969, 8921, 8993, 955, 32345, 966, 1920, 17318, 1510, 14180, 26005, 554, 16408, 42028, 112091, 13886, 13942, 1673, 54946 or 2419 protein to form an assay mixture, contacting the assay mixture with a test compound, and determining the ability of the test compound to interact with the 1722, 10280, 59917, 85553, 10653, 9235, 21668, 17794, 2210, 6169, 10102, 21061, 17662, 1468, 12282, 6350, 9035, 1820, 23652, 7301, 8925, 8701, 3533, 9462, 9123, 12788, 17729, 65552, 1261, 21476, 33770, 9380, 2569654, 33556, 53656, 44143, 32612, 10671, 261, 44570, 41922, 2552, 2417, 19319, 43969, 8921, 8993, 955, 32345, 966, 1920, 17318, 1510, 14180, 26005, 554, 16408, 42028, 112091, 13886, 13942, 1673, 54946 or 2419 protein, wherein determining the ability of the test compound to interact with the 1722, 10280, 59917, 85553, 10653, 9235, 21668, 17794, 2210, 6169, 10102, 21061, 17662, 1468, 12282, 6350, 9035, 1820, 23652, 7301, 8925, 8701, 3533, 9462, 9123, 12788, 17729, 65552, 1261, 21476, 33770, 9380, 2569654, 33556, 53656, 44143, 32612, 10671, 261, 44570, 41922, 2552, 2417, 19319, 43969, 8921, 8993, 955, 32345, 966, 1920, 17318, 1510, 14180, 26005, 554, 16408, 42028, 112091, 13886, 13942, 1673, 54946 or 2419 protein comprises determining the ability of the 1722, 10280, 59917, 85553, 10653, 9235, 21668, 17794, 2210, 6169, 10102, 21061, 17662, 1468, 12282, 6350, 9035, 1820, 23652, 7301, 8925, 8701, 3533, 9462, 9123, 12788, 17729, 65552, 1261, 21476, 33770, 9380, 2569654, 33556, 53656, 44143, 32612, 10671, 261, 44570, 41922, 2552, 2417, 19319, 43969, 8921, 8993, 955, 32345, 966, 1920, 17318, 1510, 14180, 26005, 554, 16408, 42028, 112091, 13886, 13942, 1673, 54946 or 2419 protein to preferentially bind to or modulate the activity of a 1722, 10280, 59917, 85553, 10653, 9235, 21668, 17794, 2210, 6169, 10102, 21061, 17662, 1468, 12282, 6350, 9035, 1820, 23652, 7301, 8925, 8701, 3533, 9462, 9123, 12788, 17729, 65552, 1261, 21476, 33770, 9380, 2569654, 33556, 53656, 44143, 32612, 10671, 261, 44570, 41922, 2552, 2417, 19319, 43969, 8921, 8993, 955, 32345, 966, 1920, 17318, 1510, 14180, 26005, 554, 16408, 42028, 112091, 13886, 13942, 1673, 54946 or 2419 target molecule.

[0305] In more than one embodiment of the above assay methods of the present invention, it may be desirable to immobilize either 1722, 10280, 59917, 85553, 10653, 9235, 21668, 17794, 2210, 6169, 10102, 21061, 17662, 1468, 12282, 6350, 9035, 1820, 23652, 7301, 8925, 8701, 3533, 9462, 9123, 12788, 17729, 65552, 1261, 21476, 33770, 9380, 2569654, 33556, 53656, 44143, 32612, 10671, 261, 44570, 41922, 2552, 2417, 19319, 43969, 8921, 8993, 955, 32345, 966, 1920, 17318, 1510, 14180, 26005, 554, 16408, 42028, 112091, 13886, 13942, 1673, 54946 or 2419 or its target molecule to facilitate separation of complexed from uncomplexed forms of one or both of the proteins, as well as to accommodate automation of the assay. Binding of a test compound to a 1722, 10280, 59917, 85553, 10653, 9235, 21668, 17794, 2210, 6169, 10102, 21061, 17662, 1468, 12282, 6350, 9035, 1820, 23652, 7301, 8925, 8701, 3533, 9462, 9123, 12788, 17729, 65552, 1261, 21476, 33770, 9380, 2569654, 33556, 53656, 44143, 32612, 10671, 261, 44570, 41922, 2552, 2417, 19319, 43969, 8921, 8993, 955, 32345, 966, 1920, 17318, 1510, 14180, 26005, 554, 16408, 42028, 112091, 13886, 13942, 1673, 54946 or 2419 protein, or interaction of a 1722, 10280, 59917, 85553, 10653, 9235, 21668, 17794, 2210, 6169, 10102, 21061, 17662, 1468, 12282, 6350, 9035, 1820, 23652, 7301, 8925, 8701, 3533, 9462, 9123, 12788, 17729, 65552, 1261, 21476, 33770, 9380, 2569654, 33556, 53656, 44143, 32612, 10671, 261, 44570, 41922, 2552, 2417, 19319, 43969, 8921, 8993, 955, 32345, 966, 1920, 17318, 1510, 14180, 26005, 554, 16408, 42028, 112091, 13886, 13942, 1673, 54946 or 2419 protein with a target molecule in the presence and absence of a candidate compound, can be accomplished in any vessel suitable for containing the reactants. Examples of such vessels include microtitre plates, test tubes, and micro-centrifuge tubes. In one embodiment, a fusion protein can be provided which adds a domain that allows one or both of the proteins to be bound to a matrix. For example, glutathione-S-transferase/1722, 10280, 59917, 85553, 10653, 9235, 21668, 17794, 2210, 6169, 10102, 21061, 17662, 1468, 12282, 6350, 9035, 1820, 23652, 7301, 8925, 8701, 3533, 9462, 9123, 12788, 17729, 65552, 1261, 21476, 33770, 9380, 2569654, 33556, 53656, 44143, 32612, 10671, 261, 44570, 41922, 2552, 2417, 19319, 43969, 8921, 8993, 955, 32345, 966, 1920, 17318, 1510, 14180, 26005, 554, 16408, 42028, 112091, 13886, 13942, 1673, 54946 or 2419 fusion proteins or glutathione-S-transferase/target fusion proteins can be adsorbed onto glutathione sepharose beads (Sigma Chemical, St. Louis, Mo.) or glutathione derivatized microtitre plates, which are then combined with the test compound or the test compound and either the non-adsorbed target protein or 1722, 10280, 59917, 85553, 10653, 9235, 21668, 17794, 2210, 6169, 10102, 21061, 17662, 1468, 12282, 6350, 9035, 1820, 23652, 7301, 8925, 8701, 3533, 9462, 9123, 12788, 17729, 65552, 1261, 21476, 33770, 9380, 2569654, 33556, 53656, 44143, 32612, 10671, 261, 44570, 41922, 2552, 2417, 19319, 43969, 8921, 8993, 955, 32345, 966, 1920, 17318, 1510, 14180, 26005, 554, 16408, 42028, 112091, 13886, 13942, 1673, 54946 or 2419 protein, and the mixture incubated under conditions conducive to complex formation (e.g., at physiological conditions for salt and pH). Following incubation, the beads or microtitre plate wells are washed to remove any unbound components, the matrix immobilized in the case of beads, complex determined either directly or indirectly, for example, as described above. Alternatively, the complexes can be dissociated from the matrix, and the level of 1722, 10280, 59917, 85553, 10653, 9235, 21668, 17794, 2210, 6169, 10102, 21061, 17662, 1468, 12282, 6350, 9035, 1820, 23652, 7301, 8925, 8701, 3533, 9462, 9123, 12788, 17729, 65552, 1261, 21476, 33770, 9380, 2569654, 33556, 53656, 44143, 32612, 10671, 261, 44570, 41922, 2552, 2417, 19319, 43969, 8921, 8993, 955, 32345, 966, 1920, 17318, 1510, 14180, 26005, 554, 16408, 42028, 112091, 13886, 13942, 1673, 54946 or 2419 binding or activity determined using standard techniques.

[0306] Other techniques for immobilizing proteins on matrices can also be used in the screening assays of the invention. For example, either a 1722, 10280, 59917, 85553, 10653, 9235, 21668, 17794, 2210, 6169, 10102, 21061, 17662, 1468, 12282, 6350, 9035, 1820, 23652, 7301, 8925, 8701, 3533, 9462, 9123, 12788, 17729, 65552, 1261, 21476, 33770, 9380, 2569654, 33556, 53656, 44143, 32612, 10671, 261, 44570, 41922, 2552, 2417, 19319, 43969, 8921, 8993, 955, 32345, 966, 1920, 17318, 1510, 14180, 26005, 554, 16408, 42028, 112091, 13886, 13942, 1673, 54946 or 2419 protein or a 1722, 10280, 59917, 85553, 10653, 9235, 21668, 17794, 2210, 6169, 10102, 21061, 17662, 1468, 12282, 6350, 9035, 1820, 23652, 7301, 8925, 8701, 3533, 9462, 9123, 12788, 17729, 65552, 1261, 21476, 33770, 9380, 2569654, 33556, 53656, 44143, 32612, 10671, 261, 44570, 41922, 2552, 2417, 19319, 43969, 8921, 8993, 955, 32345, 966, 1920, 17318, 1510, 14180, 26005, 554, 16408, 42028, 112091, 13886, 13942, 1673, 54946 or 2419 target molecule can be immobilized utilizing conjugation of biotin and streptavidin. Biotinylated 1722, 10280, 59917, 85553, 10653, 9235, 21668, 17794, 2210, 6169, 10102, 21061, 17662, 1468, 12282, 6350, 9035, 1820, 23652, 7301, 8925, 8701, 3533, 9462, 9123, 12788, 17729, 65552, 1261, 21476, 33770, 9380, 2569654, 33556, 53656, 44143, 32612, 10671, 261, 44570, 41922, 2552, 2417, 19319, 43969, 8921, 8993, 955, 32345, 966, 1920, 17318, 1510, 14180, 26005, 554, 16408, 42028, 112091, 13886, 13942, 1673, 54946 or 2419 protein or target molecules can be prepared from biotin-NHS(N-hydroxy-succinimide) using techniques known in the art (e.g., biotinylation kit, Pierce Chemicals, Rockford, Ill.), and immobilized in the wells of streptavidin-coated 96 well plates (Pierce Chemical). Alternatively, antibodies reactive with 1722, 10280, 59917, 85553, 10653, 9235, 21668, 17794, 2210, 6169, 10102, 21061, 17662, 1468, 12282, 6350, 9035, 1820, 23652, 7301, 8925, 8701, 3533, 9462, 9123, 12788, 17729, 65552, 1261, 21476, 33770, 9380, 2569654, 33556, 53656, 44143, 32612, 10671, 261, 44570, 41922, 2552, 2417, 19319, 43969, 8921, 8993, 955, 32345, 966, 1920, 17318, 1510, 14180, 26005, 554, 16408, 42028, 112091, 13886, 13942, 1673, 54946 or 2419 protein or target molecules but which do not interfere with binding of the 1722, 10280, 59917, 85553, 10653, 9235, 21668, 17794, 2210, 6169, 10102, 21061, 17662, 1468, 12282, 6350, 9035, 1820, 23652, 7301, 8925, 8701, 3533, 9462, 9123, 12788, 17729, 65552, 1261, 21476, 33770, 9380, 2569654, 33556, 53656, 44143, 32612, 10671, 261, 44570, 41922, 2552, 2417, 19319, 43969, 8921, 8993, 955, 32345, 966, 1920, 17318, 1510, 14180, 26005, 554, 16408, 42028, 112091, 13886, 13942, 1673, 54946 or 2419 protein to its target molecule can be derivatized to the wells of the plate, and unbound target or 1722, 10280, 59917, 85553, 10653, 9235, 21668, 17794, 2210, 6169, 10102, 21061, 17662, 1468, 12282, 6350, 9035, 1820, 23652, 7301, 8925, 8701, 3533, 9462, 9123, 12788, 17729, 65552, 1261, 21476, 33770, 9380, 2569654, 33556, 53656, 44143, 32612, 10671, 261, 44570, 41922, 2552, 2417, 19319, 43969, 8921, 8993, 955, 32345, 966, 1920, 17318, 1510, 14180, 26005, 554, 16408, 42028, 112091, 13886, 13942, 1673, 54946 or 2419 protein trapped in the wells by antibody conjugation. Methods for detecting such complexes, in addition to those described above for the GST-immobilized complexes, include immunodetection of complexes using antibodies reactive with the 1722, 10280, 59917, 85553, 10653, 9235, 21668, 17794, 2210, 6169, 10102, 21061, 17662, 1468, 12282, 6350, 9035, 1820, 23652, 7301, 8925, 8701, 3533, 9462, 9123, 12788, 17729, 65552, 1261, 21476, 33770, 9380, 2569654, 33556, 53656, 44143, 32612, 10671, 261, 44570, 41922, 2552, 2417, 19319, 43969, 8921, 8993, 955, 32345, 966, 1920, 17318, 1510, 14180, 26005, 554, 16408, 42028, 112091, 13886, 13942, 1673, 54946 or 2419 protein or target molecule, as well as enzyme-linked assays which rely on detecting an enzymatic activity associated with the 1722, 10280, 59917, 85553, 10653, 9235, 21668, 17794, 2210, 6169, 10102, 21061, 17662, 1468, 12282, 6350, 9035, 1820, 23652, 7301, 8925, 8701, 3533, 9462, 9123, 12788, 17729, 65552, 1261, 21476, 33770, 9380, 2569654, 33556, 53656, 44143, 32612, 10671, 261, 44570, 41922, 2552, 2417, 19319, 43969, 8921, 8993, 955, 32345, 966, 1920, 17318, 1510, 14180, 26005, 554, 16408, 42028, 112091, 13886, 13942, 1673, 54946 or 2419 protein or target molecule.

[0307] In another embodiment, modulators of 1722, 10280, 59917, 85553, 10653, 9235, 21668, 17794, 2210, 6169, 10102, 21061, 17662, 1468, 12282, 6350, 9035, 1820, 23652, 7301, 8925, 8701, 3533, 9462, 9123, 12788, 17729, 65552, 1261, 21476, 33770, 9380, 2569654, 33556, 53656, 44143, 32612, 10671, 261, 44570, 41922, 2552, 2417, 19319, 43969, 8921, 8993, 955, 32345, 966, 1920, 17318, 1510, 14180, 26005, 554, 16408, 42028, 112091, 13886, 13942, 1673, 54946 or 2419 expression are identified in a method wherein a cell is contacted with a candidate compound and the expression of 1722, 10280, 59917, 85553, 10653, 9235, 21668, 17794, 2210, 6169, 10102, 21061, 17662, 1468, 12282, 6350, 9035, 1820, 23652, 7301, 8925, 8701, 3533, 9462, 9123, 12788, 17729, 65552, 1261, 21476, 33770, 9380, 2569654, 33556, 53656, 44143, 32612, 10671, 261, 44570, 41922, 2552, 2417, 19319, 43969, 8921, 8993, 955, 32345, 966, 1920, 17318, 1510, 14180, 26005, 554, 16408, 42028, 112091, 13886, 13942, 1673, 54946 or 2419 mRNA or protein in the cell is determined. The level of expression of 1722, 10280, 59917, 85553, 10653, 9235, 21668, 17794, 2210, 6169, 10102, 21061, 17662, 1468, 12282, 6350, 9035, 1820, 23652, 7301, 8925, 8701, 3533, 9462, 9123, 12788, 17729, 65552, 1261, 21476, 33770, 9380, 2569654, 33556, 53656, 44143, 32612, 10671, 261, 44570, 41922, 2552, 2417, 19319, 43969, 8921, 8993, 955, 32345, 966, 1920, 17318, 1510, 14180, 26005, 554, 16408, 42028, 112091, 13886, 13942, 1673, 54946 or 2419 mRNA or protein in the presence of the candidate compound is compared to the level of expression of 1722, 10280, 59917, 85553, 10653, 9235, 21668, 17794, 2210, 6169, 10102, 21061, 17662, 1468, 12282, 6350, 9035, 1820, 23652, 7301, 8925, 8701, 3533, 9462, 9123, 12788, 17729, 65552, 1261, 21476, 33770, 9380, 2569654, 33556, 53656, 44143, 32612, 10671, 261, 44570, 41922, 2552, 2417, 19319, 43969, 8921, 8993, 955, 32345, 966, 1920, 17318, 1510, 14180, 26005, 554, 16408, 42028, 112091, 13886, 13942, 1673, 54946 or 2419 mRNA or protein in the absence of the candidate compound. The candidate compound can then be identified as a modulator of 1722, 10280, 59917, 85553, 10653, 9235, 21668, 17794, 2210, 6169, 10102, 21061, 17662, 1468, 12282, 6350, 9035, 1820, 23652, 7301, 8925, 8701, 3533, 9462, 9123, 12788, 17729, 65552, 1261, 21476, 33770, 9380, 2569654, 33556, 53656, 44143, 32612, 10671, 261, 44570, 41922, 2552, 2417, 19319, 43969, 8921, 8993, 955, 32345, 966, 1920, 17318, 1510, 14180, 26005, 554, 16408, 42028, 112091, 13886, 13942, 1673, 54946 or 2419 expression based on this comparison. For example, when expression of 1722, 10280, 59917, 85553, 10653, 9235, 21668, 17794, 2210, 6169, 10102, 21061, 17662, 1468, 12282, 6350, 9035, 1820, 23652, 7301, 8925, 8701, 3533, 9462, 9123, 12788, 17729, 65552, 1261, 21476, 33770, 9380, 2569654, 33556, 53656, 44143, 32612, 10671, 261, 44570, 41922, 2552, 2417, 19319, 43969, 8921, 8993, 955, 32345, 966, 1920, 17318, 1510, 14180, 26005, 554, 16408, 42028, 112091, 13886, 13942, 1673, 54946 or 2419 mRNA or protein is greater (statistically significantly greater) in the presence of the candidate compound than in its absence, the candidate compound is identified as a stimulator of 1722, 10280, 59917, 85553, 10653, 9235, 21668, 17794, 2210, 6169, 10102, 21061, 17662, 1468, 12282, 6350, 9035, 1820, 23652, 7301, 8925, 8701, 3533, 9462, 9123, 12788, 17729, 65552, 1261, 21476, 33770, 9380, 2569654, 33556, 53656, 44143, 32612, 10671, 261, 44570, 41922, 2552, 2417, 19319, 43969, 8921, 8993, 955, 32345, 966, 1920, 17318, 1510, 14180, 26005, 554, 16408, 42028, 112091, 13886, 13942, 1673, 54946 or 2419 mRNA or protein expression. Alternatively, when expression of 1722, 10280, 59917, 85553, 10653, 9235, 21668, 17794, 2210, 6169, 10102, 21061, 17662, 1468, 12282, 6350, 9035, 1820, 23652, 7301, 8925, 8701, 3533, 9462, 9123, 12788, 17729, 65552, 1261, 21476, 33770, 9380, 2569654, 33556, 53656, 44143, 32612, 10671, 261, 44570, 41922, 2552, 2417, 19319, 43969, 8921, 8993, 955, 32345, 966, 1920, 17318, 1510, 14180, 26005, 554, 16408, 42028, 112091, 13886, 13942, 1673, 54946 or 2419 mRNA or protein is less (statistically significantly less) in the presence of the candidate compound than in its absence, the candidate compound is identified as an inhibitor of 1722, 10280, 59917, 85553, 10653, 9235, 21668, 17794, 2210, 6169, 10102, 21061, 17662, 1468, 12282, 6350, 9035, 1820, 23652, 7301, 8925, 8701, 3533, 9462, 9123, 12788, 17729, 65552, 1261, 21476, 33770, 9380, 2569654, 33556, 53656, 44143, 32612, 10671, 261, 44570, 41922, 2552, 2417, 19319, 43969, 8921, 8993, 955, 32345, 966, 1920, 17318, 1510, 14180, 26005, 554, 16408, 42028, 112091, 13886, 13942, 1673, 54946 or 2419 mRNA or protein expression. The level of 1722, 10280, 59917, 85553, 10653, 9235, 21668, 17794, 2210, 6169, 10102, 21061, 17662, 1468, 12282, 6350, 9035, 1820, 23652, 7301, 8925, 8701, 3533, 9462, 9123, 12788, 17729, 65552, 1261, 21476, 33770, 9380, 2569654, 33556, 53656, 44143, 32612, 10671, 261, 44570, 41922, 2552, 2417, 19319, 43969, 8921, 8993, 955, 32345, 966, 1920, 17318, 1510, 14180, 26005, 554, 16408, 42028, 112091, 13886, 13942, 1673, 54946 or 2419 mRNA or protein expression in the cells can be determined by methods described herein for detecting 1722, 10280, 59917, 85553, 10653, 9235, 21668, 17794, 2210, 6169, 10102, 21061, 17662, 1468, 12282, 6350, 9035, 1820, 23652, 7301, 8925, 8701, 3533, 9462, 9123, 12788, 17729, 65552, 1261, 21476, 33770, 9380, 2569654, 33556, 53656, 44143, 32612, 10671, 261, 44570, 41922, 2552, 2417, 19319, 43969, 8921, 8993, 955, 32345, 966, 1920, 17318, 1510, 14180, 26005, 554, 16408, 42028, 112091, 13886, 13942, 1673, 54946 or 2419 mRNA or protein.

[0308] In yet another aspect of the invention, the 1722, 10280, 59917, 85553, 10653, 9235, 21668, 17794, 2210, 6169, 10102, 21061, 17662, 1468, 12282, 6350, 9035, 1820, 23652, 7301, 8925, 8701, 3533, 9462, 9123, 12788, 17729, 65552, 1261, 21476, 33770, 9380, 2569654, 33556, 53656, 44143, 32612, 10671, 261, 44570, 41922, 2552, 2417, 19319, 43969, 8921, 8993, 955, 32345, 966, 1920, 17318, 1510, 14180, 26005, 554, 16408, 42028, 112091, 13886, 13942, 1673, 54946 or 2419 proteins can be used as “bait proteins” in a two-hybrid assay or three-hybrid assay (see, e.g., U.S. Pat. No. 5,283,317; Zervos et al. (1993) Cell 72:223-232; Madura et al. (1993) J. Biol. Chem. 268:12046-12054; Bartel et al. (1993) Biotechniques 14:920-924; Iwabuchi et al. (1993) Oncogene 8:1693-1696; and Brent WO94/10300), to identify other proteins, which bind to or interact with 1722, 10280, 59917, 85553, 10653, 9235, 21668, 17794, 2210, 6169, 10102, 21061, 17662, 1468, 12282, 6350, 9035, 1820, 23652, 7301, 8925, 8701, 3533, 9462, 9123, 12788, 17729, 65552, 1261, 21476, 33770, 9380, 2569654, 33556, 53656, 44143, 32612, 10671, 261, 44570, 41922, 2552, 2417, 19319, 43969, 8921, 8993, 955, 32345, 966, 1920, 17318, 1510, 14180, 26005, 554, 16408, 42028, 112091, 13886, 13942, 1673, 54946 or 2419(“1722, 10280, 59917, 85553, 10653, 9235, 21668, 17794, 2210, 6169, 10102, 21061, 17662, 1468, 12282, 6350, 9035, 1820, 23652, 7301, 8925, 8701, 3533, 9462, 9123, 12788, 17729, 65552, 1261, 21476, 33770, 9380, 2569654, 33556, 53656, 44143, 32612, 10671, 261, 44570, 41922, 2552, 2417, 19319, 43969, 8921, 8993, 955, 32345, 966, 1920, 17318, 1510, 14180, 26005, 554, 16408, 42028, 112091, 13886, 13942, 1673, 54946 or 2419-binding proteins” or “1722, 10280, 59917, 85553, 10653, 9235, 21668, 17794, 2210, 6169, 10102, 21061, 17662, 1468, 12282, 6350, 9035, 1820, 23652, 7301, 8925, 8701, 3533, 9462, 9123, 12788, 17729, 65552, 1261, 21476, 33770, 9380, 2569654, 33556, 53656, 44143, 32612, 10671, 261, 44570, 41922, 2552, 2417, 19319, 43969, 8921, 8993, 955, 32345, 966, 1920, 17318, 1510, 14180, 26005, 554, 16408, 42028, 112091, 13886, 13942, 1673, 54946 or 2419-bp”) and are involved in 1722, 10280, 59917, 85553, 10653, 9235, 21668, 17794, 2210, 6169, 10102, 21061, 17662, 1468, 12282, 6350, 9035, 1820, 23652, 7301, 8925, 8701, 3533, 9462, 9123, 12788, 17729, 65552, 1261, 21476, 33770, 9380, 2569654, 33556, 53656, 44143, 32612, 10671, 261, 44570, 41922, 2552, 2417, 19319, 43969, 8921, 8993, 955, 32345, 966, 1920, 17318, 1510, 14180, 26005, 554, 16408, 42028, 112091, 13886, 13942, 1673, 54946 or 2419 activity. Such 1722, 10280, 59917, 85553, 10653, 9235, 21668, 17794, 2210, 6169, 10102, 21061, 17662, 1468, 12282, 6350, 9035, 1820, 23652, 7301, 8925, 8701, 3533, 9462, 9123, 12788, 17729, 65552, 1261, 21476, 33770, 9380, 2569654, 33556, 53656, 44143, 32612, 10671, 261, 44570, 41922, 2552, 2417, 19319, 43969, 8921, 8993, 955, 32345, 966, 1920, 17318, 1510, 14180, 26005, 554, 16408, 42028, 112091, 13886, 13942, 1673, 54946 or 2419-binding proteins are also likely to be involved in the propagation of signals by the 1722, 10280, 59917, 85553, 10653, 9235, 21668, 17794, 2210, 6169, 10102, 21061, 17662, 1468, 12282, 6350, 9035, 1820, 23652, 7301, 8925, 8701, 3533, 9462, 9123, 12788, 17729, 65552, 1261, 21476, 33770, 9380, 2569654, 33556, 53656, 44143, 32612, 10671, 261, 44570, 41922, 2552, 2417, 19319, 43969, 8921, 8993, 955, 32345, 966, 1920, 17318, 1510, 14180, 26005, 554, 16408, 42028, 112091, 13886, 13942, 1673, 54946 or 2419 proteins or 1722, 10280, 59917, 85553, 10653, 9235, 21668, 17794, 2210, 6169, 10102, 21061, 17662, 1468, 12282, 6350, 9035, 1820, 23652, 7301, 8925, 8701, 3533, 9462, 9123, 12788, 17729, 65552, 1261, 21476, 33770, 9380, 2569654, 33556, 53656, 44143, 32612, 10671, 261, 44570, 41922, 2552, 2417, 19319, 43969, 8921, 8993, 955, 32345, 966, 1920, 17318, 1510, 14180, 26005, 554, 16408, 42028, 112091, 13886, 13942, 1673, 54946 or 2419 targets as, for example, downstream elements of a 1722, 10280, 59917, 85553, 10653, 9235, 21668, 17794, 2210, 6169, 10102, 21061, 17662, 1468, 12282, 6350, 9035, 1820, 23652, 7301, 8925, 8701, 3533, 9462, 9123, 12788, 17729, 65552, 1261, 21476, 33770, 9380, 2569654, 33556, 53656, 44143, 32612, 10671, 261, 44570, 41922, 2552, 2417, 19319, 43969, 8921, 8993, 955, 32345, 966, 1920, 17318, 1510, 14180, 26005, 554, 16408, 42028, 112091, 13886, 13942, 1673, 54946 or 2419-mediated signaling pathway. Alternatively, such 1722, 10280, 59917, 85553, 10653, 9235, 21668, 17794, 2210, 6169, 10102, 21061, 17662, 1468, 12282, 6350, 9035, 1820, 23652, 7301, 8925, 8701, 3533, 9462, 9123, 12788, 17729, 65552, 1261, 21476, 33770, 9380, 2569654, 33556, 53656, 44143, 32612, 10671, 261, 44570, 41922, 2552, 2417, 19319, 43969, 8921, 8993, 955, 32345, 966, 1920, 17318, 1510, 14180, 26005, 554, 16408, 42028, 112091, 13886, 13942, 1673, 54946 or 2419-binding proteins are likely to be 1722, 10280, 59917, 85553, 10653, 9235, 21668, 17794, 2210, 6169, 10102, 21061, 17662, 1468, 12282, 6350, 9035, 1820, 23652, 7301, 8925, 8701, 3533, 9462, 9123, 12788, 17729, 65552, 1261, 21476, 33770, 9380, 2569654, 33556, 53656, 44143, 32612, 10671, 261, 44570, 41922, 2552, 2417, 19319, 43969, 8921, 8993, 955, 32345, 966, 1920, 17318, 1510, 14180, 26005, 554, 16408, 42028, 112091, 13886, 13942, 1673, 54946 or 2419 inhibitors.

[0309] The two-hybrid system is based on the modular nature of most transcription factors, which consist of separable DNA-binding and activation domains. Briefly, the assay utilizes two different DNA constructs. In one construct, the gene that codes for a 1722, 10280, 59917, 85553, 10653, 9235, 21668, 17794, 2210, 6169, 10102, 21061, 17662, 1468, 12282, 6350, 9035, 1820, 23652, 7301, 8925, 8701, 3533, 9462, 9123, 12788, 17729, 65552, 1261, 21476, 33770, 9380, 2569654, 33556, 53656, 44143, 32612, 10671, 261, 44570, 41922, 2552, 2417, 19319, 43969, 8921, 8993, 955, 32345, 966, 1920, 17318, 1510, 14180, 26005, 554, 16408, 42028, 112091, 13886, 13942, 1673, 54946 or 2419 protein is fused to a gene encoding the DNA binding domain of a known transcription factor (e.g., GAL-4). In the other construct, a DNA sequence, from a library of DNA sequences, that encodes an unidentified protein (“prey” or “sample”) is fused to a gene that codes for the activation domain of the known transcription factor. If the “bait” and the “prey” proteins are able to interact, in vivo, forming a 1722, 10280, 59917, 85553, 10653, 9235, 21668, 17794, 2210, 6169, 10102, 21061, 17662, 1468, 12282, 6350, 9035, 1820, 23652, 7301, 8925, 8701, 3533, 9462, 9123, 12788, 17729, 65552, 1261, 21476, 33770, 9380, 2569654, 33556, 53656, 44143, 32612, 10671, 261, 44570, 41922, 2552, 2417, 19319, 43969, 8921, 8993, 955, 32345, 966, 1920, 17318, 1510, 14180, 26005, 554, 16408, 42028, 112091, 13886, 13942, 1673, 54946 or 2419-dependent complex, the DNA-binding and activation domains of the transcription factor are brought into close proximity. This proximity allows transcription of a reporter gene (e.g., LacZ) which is operably linked to a transcriptional regulatory site responsive to the transcription factor. Expression of the reporter gene can be detected and cell colonies containing the functional transcription factor can be isolated and used to obtain the cloned gene which encodes the protein which interacts with the 1722, 10280, 59917, 85553, 10653, 9235, 21668, 17794, 2210, 6169, 10102, 21061, 17662, 1468, 12282, 6350, 9035, 1820, 23652, 7301, 8925, 8701, 3533, 9462, 9123, 12788, 17729, 65552, 1261, 21476, 33770, 9380, 2569654, 33556, 53656, 44143, 32612, 10671, 261, 44570, 41922, 2552, 2417, 19319, 43969, 8921, 8993, 955, 32345, 966, 1920, 17318, 1510, 14180, 26005, 554, 16408, 42028, 112091, 13886, 13942, 1673, 54946 or 2419 protein.

[0310] In another aspect, the invention pertains to a combination of two or more of the assays described herein. For example, a modulating agent can be identified using a cell-based or a cell free assay, and the ability of the agent to modulate the activity of a 1722, 10280, 59917, 85553, 10653, 9235, 21668, 17794, 2210, 6169, 10102, 21061, 17662, 1468, 12282, 6350, 9035, 1820, 23652, 7301, 8925, 8701, 3533, 9462, 9123, 12788, 17729, 65552, 1261, 21476, 33770, 9380, 2569654, 33556, 53656, 44143, 32612, 10671, 261, 44570, 41922, 2552, 2417, 19319, 43969, 8921, 8993, 955, 32345, 966, 1920, 17318, 1510, 14180, 26005, 554, 16408, 42028, 112091, 13886, 13942, 1673, 54946 or 2419 protein can be confirmed in vivo, e.g., in an animal such as an animal model for cardiovascular disease, e.g., atherosclerosis and/or thrombosis, as described herein.

[0311] This invention further pertains to novel agents identified by the above-described screening assays. Accordingly, it is within the scope of this invention to further use an agent identified as described herein in an appropriate animal model. For example, an agent identified as described herein (e.g., a 1722, 10280, 59917, 85553, 10653, 9235, 21668, 17794, 2210, 6169, 10102, 21061, 17662, 1468, 12282, 6350, 9035, 1820, 23652, 7301, 8925, 8701, 3533, 9462, 9123, 12788, 17729, 65552, 1261, 21476, 33770, 9380, 2569654, 33556, 53656, 44143, 32612, 10671, 261, 44570, 41922, 2552, 2417, 19319, 43969, 8921, 8993, 955, 32345, 966, 1920, 17318, 1510, 14180, 26005, 554, 16408, 42028, 112091, 13886, 13942, 1673, 54946 or 2419 modulating agent, an antisense 1722, 10280, 59917, 85553, 10653, 9235, 21668, 17794, 2210, 6169, 10102, 21061, 17662, 1468, 12282, 6350, 9035, 1820, 23652, 7301, 8925, 8701, 3533, 9462, 9123, 12788, 17729, 65552, 1261, 21476, 33770, 9380, 2569654, 33556, 53656, 44143, 32612, 10671, 261, 44570, 41922, 2552, 2417, 19319, 43969, 8921, 8993, 955, 32345, 966, 1920, 17318, 1510, 14180, 26005, 554, 16408, 42028, 112091, 13886, 13942, 1673, 54946 or 2419 nucleic acid molecule, a 1722, 10280, 59917, 85553, 10653, 9235, 21668, 17794, 2210, 6169, 10102, 21061, 17662, 1468, 12282, 6350, 9035, 1820, 23652, 7301, 8925, 8701, 3533, 9462, 9123, 12788, 17729, 65552, 1261, 21476, 33770, 9380, 2569654, 33556, 53656, 44143, 32612, 10671, 261, 44570, 41922, 2552, 2417, 19319, 43969, 8921, 8993, 955, 32345, 966, 1920, 17318, 1510, 14180, 26005, 554, 16408, 42028, 112091, 13886, 13942, 1673, 54946 or 2419-specific antibody, or a 1722, 10280, 59917, 85553, 10653, 9235, 21668, 17794, 2210, 6169, 10102, 21061, 17662, 1468, 12282, 6350, 9035, 1820, 23652, 7301, 8925, 8701, 3533, 9462, 9123, 12788, 17729, 65552, 1261, 21476, 33770, 9380, 2569654, 33556, 53656, 44143, 32612, 10671, 261, 44570, 41922, 2552, 2417, 19319, 43969, 8921, 8993, 955, 32345, 966, 1920, 17318, 1510, 14180, 26005, 554, 16408, 42028, 112091, 13886, 13942, 1673, 54946 or 2419-binding partner) can be used in an animal model to determine the efficacy, toxicity, or side effects of treatment with such an agent. Alternatively, an agent identified as described herein can be used in an animal model to determine the mechanism of action of such an agent. Furthermore, this invention pertains to uses of novel agents identified by the above-described screening assays for treatments as described herein.

[0312] Any of the compounds, including but not limited to compounds such as those identified in the foregoing assay systems, may be tested for the ability to treat cardiovascular disease symptoms. Cell-based and animal model-based assays for the identification of compounds exhibiting such an ability to ameliorate cardiovascular disease systems are described herein.

[0313] In one aspect, cell-based systems, as described herein, may be used to identify compounds which may act to treat at least one cardiovascular disease symptom. For example, such cell systems may be exposed to a compound, suspected of exhibiting an ability to treat cardiovascular disease symptoms, at a sufficient concentration and for a time sufficient to elicit such an amelioration of cardiovascular disease symptoms in the exposed cells. After exposure, the cells are examined to determine whether one or more of the cardiovascular disease cellular phenotypes has been altered to resemble a more normal or more wild type, non-cardiovascular disease phenotype. Cellular phenotypes that are associated with cardiovascular disease states include aberrant proliferation and migration, angiogenesis, deposition of extracellular matrix components, accumulation of intracellular lipids, and expression of growth factors, cytokines, and other inflammatory mediators.

[0314] In addition, animal-based cardiovascular disease systems, such as those described herein, may be used to identify compounds capable of ameliorating cardiovascular disease symptoms. Such animal models may be used as test substrates for the identification of drugs, pharmaceuticals, therapies, and interventions which may be effective in treating cardiovascular disease. For example, animal models may be exposed to a compound, suspected of exhibiting an ability to ameliorate cardiovascular disease symptoms, at a sufficient concentration and for a time sufficient to elicit such an amelioration of cardiovascular disease symptoms in the exposed animals. The response of the animals to the exposure may be monitored by assessing the reversal of disorders associated with cardiovascular disease, for example, by counting the number of atherosclerotic plaques and/or measuring their size before and after treatment.

[0315] With regard to intervention, any treatments which reverse any aspect of cardiovascular disease symptoms should be considered as candidates for human cardiovascular disease therapeutic intervention. Dosages of test agents may be determined by deriving dose-response curves.

[0316] Additionally, gene expression patterns may be utilized to assess the ability of a compound to ameliorate cardiovascular disease symptoms. For example, the expression pattern of one or more genes may form part of a “gene expression profile” or “transcriptional profile” which may be then be used in such an assessment. “Gene expression profile” or “transcriptional profile”, as used herein, includes the pattern of mRNA expression obtained for a given tissue or cell type under a given set of conditions. Such conditions may include, but are not limited to, atherosclerosis, ischemia/reperfusion, hypertension, restenosis, and arterial inflammation, including any of the control or experimental conditions described herein, for example, atherogenic cytokine stimulation of macrophages. Gene expression profiles may be generated, for example, by utilizing a differential display procedure, Northern analysis and/or RT-PCR. In one embodiment, 1722, 10280, 59917, 85553, 10653, 9235, 21668, 17794, 2210, 6169, 10102, 21061, 17662, 1468, 12282, 6350, 9035, 1820, 23652, 7301, 8925, 8701, 3533, 9462, 9123, 12788, 17729, 65552, 1261, 21476, 33770, 9380, 2569654, 33556, 53656, 44143, 32612, 10671, 261, 44570, 41922, 2552, 2417, 19319, 43969, 8921, 8993, 955, 32345, 966, 1920, 17318, 1510, 14180, 26005, 554, 16408, 42028, 112091, 13886, 13942, 1673, 54946 or 2419 gene sequences may be used as probes and/or PCR primers for the generation and corroboration of such gene expression profiles.

[0317] Gene expression profiles may be characterized for known states, either cardiovascular disease or normal, within the cell- and/or animal-based model systems. Subsequently, these known gene expression profiles may be compared to ascertain the effect a test compound has to modify such gene expression profiles, and to cause the profile to more closely resemble that of a more desirable profile.

[0318] For example, administration of a compound may cause the gene expression profile of a cardiovascular disease model system to more closely resemble the control system. Administration of a compound may, alternatively, cause the gene expression profile of a control system to begin to mimic a cardiovascular disease state. Such a compound may, for example, be used in further characterizing the compound of interest, or may be used in the generation of additional animal models.

[0319] II. Cell- and Animal-Based Model Systems

[0320] Described herein are cell- and animal-based systems which act as models for cardiovascular disease. These systems may be used in a variety of applications. For example, the cell- and animal-based model systems may be used to further characterize differentially expressed genes associated with cardiovascular disease, e.g., 1722, 10280, 59917, 85553, 10653, 9235, 21668, 17794, 2210, 6169, 10102, 21061, 17662, 1468, 12282, 6350, 9035, 1820, 23652, 7301, 8925, 8701, 3533, 9462, 9123, 12788, 17729, 65552, 1261, 21476, 33770, 9380, 2569654, 33556, 53656, 44143, 32612, 10671, 261, 44570, 41922, 2552, 2417, 19319, 43969, 8921, 8993, 955, 32345, 966, 1920, 17318, 1510, 14180, 26005, 554, 16408, 42028, 112091, 13886, 13942, 1673, 54946 or 2419. In addition, animal- and cell-based assays may be used as part of screening strategies designed to identify compounds which are capable of ameliorating cardiovascular disease symptoms, as described, below. Thus, the animal- and cell-based models may be used to identify drugs, pharmaceuticals, therapies and interventions which may be effective in treating cardiovascular disease. Furthermore, such animal models may be used to determine the LD50 and the ED50 in animal subjects, and such data can be used to determine the in vivo efficacy of potential cardiovascular disease treatments.

[0321] A. Animal-Based Systems

[0322] Animal-based model systems of cardiovascular disease may include, but are not limited to, non-recombinant and engineered transgenic animals.

[0323] Non-recombinant animal models for cardiovascular disease may include, for example, genetic models. Such genetic cardiovascular disease models may include, for example, ApoB or ApoR deficient pigs (Rapacz, et al., 1986, Science 234:1573-1577) and Watanabe heritable hyperlipidemic (WHHL) rabbits (Kita et al., 1987, Proc. Natl. Acad. Sci USA 84: 5928-5931). Transgenic mouse models in cardiovascular disease and angiogenesis are reviewed in Carmeliet, P. and Collen, D. (2000) J. Pathol. 190:387-405.

[0324] Non-recombinant, non-genetic animal models of atherosclerosis may include, for example, pig, rabbit, or rat models in which the animal has been exposed to either chemical wounding through dietary supplementation of LDL, or mechanical wounding through balloon catheter angioplasty. Animal models of cardiovascular disease also include rat myocardial infarction models (described in, for example, Schwarz, ER et al. (2000) J. Am. Coll. Cardiol. 35:1323-1330) and models of chromic cardiac ischemia in rabbits (described in, for example, Operschall, C et al. (2000) J. Appl. Physiol. 88:1438-1445).

[0325] Additionally, animal models exhibiting cardiovascular disease symptoms may be engineered by using, for example, 1722, 10280, 59917, 85553, 10653, 9235, 21668, 17794, 2210, 6169, 10102, 21061, 17662, 1468, 12282, 6350, 9035, 1820, 23652, 7301, 8925, 8701, 3533, 9462, 9123, 12788, 17729, 65552, 1261, 21476, 33770, 9380, 2569654, 33556, 53656, 44143, 32612, 10671, 261, 44570, 41922, 2552, 2417, 19319, 43969, 8921, 8993, 955, 32345, 966, 1920, 17318, 1510, 14180, 26005, 554, 16408, 42028, 112091, 13886, 13942, 1673, 54946 or 2419 gene sequences described above, in conjunction with techniques for producing transgenic animals that are well known to those of skill in the art. For example, 1722, 10280, 59917, 85553, 10653, 9235, 21668, 17794, 2210, 6169, 10102, 21061, 17662, 1468, 12282, 6350, 9035, 1820, 23652, 7301, 8925, 8701, 3533, 9462, 9123, 12788, 17729, 65552, 1261, 21476, 33770, 9380, 2569654, 33556, 53656, 44143, 32612, 10671, 261, 44570, 41922, 2552, 2417, 19319, 43969, 8921, 8993, 955, 32345, 966, 1920, 17318, 1510, 14180, 26005, 554, 16408, 42028, 112091, 13886, 13942, 1673, 54946 or 2419 gene sequences may be introduced into, and overexpressed in, the genome of the animal of interest, or, if endogenous 1722, 10280, 59917, 85553, 10653, 9235, 21668, 17794, 2210, 6169, 10102, 21061, 17662, 1468, 12282, 6350, 9035, 1820, 23652, 7301, 8925, 8701, 3533, 9462, 9123, 12788, 17729, 65552, 1261, 21476, 33770, 9380, 2569654, 33556, 53656, 44143, 32612, 10671, 261, 44570, 41922, 2552, 2417, 19319, 43969, 8921, 8993, 955, 32345, 966, 1920, 17318, 1510, 14180, 26005, 554, 16408, 42028, 112091, 13886, 13942, 1673, 54946 or 2419 gene sequences are present, they may either be overexpressed or, alternatively, be disrupted in order to underexpress or inactivate 1722, 10280, 59917, 85553, 10653, 9235, 21668, 17794, 2210, 6169, 10102, 21061, 17662, 1468, 12282, 6350, 9035, 1820, 23652, 7301, 8925, 8701, 3533, 9462, 9123, 12788, 17729, 65552, 1261, 21476, 33770, 9380, 2569654, 33556, 53656, 44143, 32612, 10671, 261, 44570, 41922, 2552, 2417, 19319, 43969, 8921, 8993, 955, 32345, 966, 1920, 17318, 1510, 14180, 26005, 554, 16408, 42028, 112091, 13886, 13942, 1673, 54946 or 2419 gene expression, such as described for the disruption of ApoE in mice (Plump et al., 1992, Cell 71: 343-353).

[0326] The host cells of the invention can also be used to produce non-human transgenic animals. For example, in one embodiment, a host cell of the invention is a fertilized oocyte or an embryonic stem cell into which 1722, 10280, 59917, 85553, 10653, 9235, 21668, 17794, 2210, 6169, 10102, 21061, 17662, 1468, 12282, 6350, 9035, 1820, 23652, 7301, 8925, 8701, 3533, 9462, 9123, 12788, 17729, 65552, 1261, 21476, 33770, 9380, 2569654, 33556, 53656, 44143, 32612, 10671, 261, 44570, 41922, 2552, 2417, 19319, 43969, 8921, 8993, 955, 32345, 966, 1920, 17318, 1510, 14180, 26005, 554, 16408, 42028, 112091, 13886, 13942, 1673, 54946 or 2419-coding sequences have been introduced. Such host cells can then be used to create non-human transgenic animals in which exogenous 1722, 10280, 59917, 85553, 10653, 9235, 21668, 17794, 2210, 6169, 10102, 21061, 17662, 1468, 12282, 6350, 9035, 1820, 23652, 7301, 8925, 8701, 3533, 9462, 9123, 12788, 17729, 65552, 1261, 21476, 33770, 9380, 2569654, 33556, 53656, 44143, 32612, 10671, 261, 44570, 41922, 2552, 2417, 19319, 43969, 8921, 8993, 955, 32345, 966, 1920, 17318, 1510, 14180, 26005, 554, 16408, 42028, 112091, 13886, 13942, 1673, 54946 or 2419 sequences have been introduced into their genome or homologous recombinant animals in which endogenous 1722, 10280, 59917, 85553, 10653, 9235, 21668, 17794, 2210, 6169, 10102, 21061, 17662, 1468, 12282, 6350, 9035, 1820, 23652, 7301, 8925, 8701, 3533, 9462, 9123, 12788, 17729, 65552, 1261, 21476, 33770, 9380, 2569654, 33556, 53656, 44143, 32612, 10671, 261, 44570, 41922, 2552, 2417, 19319, 43969, 8921, 8993, 955, 32345, 966, 1920, 17318, 1510, 14180, 26005, 554, 16408, 42028, 112091, 13886, 13942, 1673, 54946 or 2419 sequences have been altered. Such animals are useful for studying the function and/or activity of a 1722, 10280, 59917, 85553, 10653, 9235, 21668, 17794, 2210, 6169, 10102, 21061, 17662, 1468, 12282, 6350, 9035, 1820, 23652, 7301, 8925, 8701, 3533, 9462, 9123, 12788, 17729, 65552, 1261, 21476, 33770, 9380, 2569654, 33556, 53656, 44143, 32612, 10671, 261, 44570, 41922, 2552, 2417, 19319, 43969, 8921, 8993, 955, 32345, 966, 1920, 17318, 1510, 14180, 26005, 554, 16408, 42028, 112091, 13886, 13942, 1673, 54946 or 2419 and for identifying and/or evaluating modulators of 1722, 10280, 59917, 85553, 10653, 9235, 21668, 17794, 2210, 6169, 10102, 21061, 17662, 1468, 12282, 6350, 9035, 1820, 23652, 7301, 8925, 8701, 3533, 9462, 9123, 12788, 17729, 65552, 1261, 21476, 33770, 9380, 2569654, 33556, 53656, 44143, 32612, 10671, 261, 44570, 41922, 2552, 2417, 19319, 43969, 8921, 8993, 955, 32345, 966, 1920, 17318, 1510, 14180, 26005, 554, 16408, 42028, 112091, 13886, 13942, 1673, 54946 or 2419 activity. As used herein, a “transgenic animal” is a non-human animal, preferably a mammal, more preferably a rodent such as a rat or mouse, in which one or more of the cells of the animal includes a transgene. Other examples of transgenic animals include non-human primates, sheep, dogs, cows, goats, chickens, amphibians, and the like. A transgene is exogenous DNA which is integrated into the genome of a cell from which a transgenic animal develops and which remains in the genome of the mature animal, thereby directing the expression of an encoded gene product in one or more cell types or tissues of the transgenic animal. As used herein, a “homologous recombinant animal” is a non-human animal, preferably a mammal, more preferably a mouse, in which an endogenous 1722, 10280, 59917, 85553, 10653, 9235, 21668, 17794, 2210, 6169, 10102, 21061, 17662, 1468, 12282, 6350, 9035, 1820, 23652, 7301, 8925, 8701, 3533, 9462, 9123, 12788, 17729, 65552, 1261, 21476, 33770, 9380, 2569654, 33556, 53656, 44143, 32612, 10671, 261, 44570, 41922, 2552, 2417, 19319, 43969, 8921, 8993, 955, 32345, 966, 1920, 17318, 1510, 14180, 26005, 554, 16408, 42028, 112091, 13886, 13942, 1673, 54946 or 2419 gene has been altered by homologous recombination between the endogenous gene and an exogenous DNA molecule introduced into a cell of the animal, e.g., an embryonic cell of the animal, prior to development of the animal.

[0327] A transgenic animal used in the methods of the invention can be created by introducing a 1722, 10280, 59917, 85553, 10653, 9235, 21668, 17794, 2210, 6169, 10102, 21061, 17662, 1468, 12282, 6350, 9035, 1820, 23652, 7301, 8925, 8701, 3533, 9462, 9123, 12788, 17729, 65552, 1261, 21476, 33770, 9380, 2569654, 33556, 53656, 44143, 32612, 10671, 261, 44570, 41922, 2552, 2417, 19319, 43969, 8921, 8993, 955, 32345, 966, 1920, 17318, 1510, 14180, 26005, 554, 16408, 42028, 112091, 13886, 13942, 1673, 54946 or 2419-encoding nucleic acid into the male pronuclei of a fertilized oocyte, e.g., by microinjection, retroviral infection, and allowing the oocyte to develop in a pseudopregnant female foster animal. The 1722, 10280, 59917, 85553, 10653, 9235, 21668, 17794, 2210, 6169, 10102, 21061, 17662, 1468, 12282, 6350, 9035, 1820, 23652, 7301, 8925, 8701, 3533, 9462, 9123, 12788, 17729, 65552, 1261, 21476, 33770, 9380, 2569654, 33556, 53656, 44143, 32612, 10671, 261, 44570, 41922, 2552, 2417, 19319, 43969, 8921, 8993, 955, 32345, 966, 1920, 17318, 1510, 14180, 26005, 554, 16408, 42028, 112091, 13886, 13942, 1673, 54946 or 2419 cDNA sequence can be introduced as a transgene into the genome of a non-human animal. Alternatively, a nonhuman homologue of a human 1722, 10280, 59917, 85553, 10653, 9235, 21668, 17794, 2210, 6169, 10102, 21061, 17662, 1468, 12282, 6350, 9035, 1820, 23652, 7301, 8925, 8701, 3533, 9462, 9123, 12788, 17729, 65552, 1261, 21476, 33770, 9380, 2569654, 33556, 53656, 44143, 32612, 10671, 261, 44570, 41922, 2552, 2417, 19319, 43969, 8921, 8993, 955, 32345, 966, 1920, 17318, 1510, 14180, 26005, 554, 16408, 42028, 112091, 13886, 13942, 1673, 54946 or 2419 gene, such as a mouse or rat 1722, 10280, 59917, 85553, 10653, 9235, 21668, 17794, 2210, 6169, 10102, 21061, 17662, 1468, 12282, 6350, 9035, 1820, 23652, 7301, 8925, 8701, 3533, 9462, 9123, 12788, 17729, 65552, 1261, 21476, 33770, 9380, 2569654, 33556, 53656, 44143, 32612, 10671, 261, 44570, 41922, 2552, 2417, 19319, 43969, 8921, 8993, 955, 32345, 966, 1920, 17318, 1510, 14180, 26005, 554, 16408, 42028, 112091, 13886, 13942, 1673, 54946 or 2419 gene, can be used as a transgene. Alternatively, a 1722, 10280, 59917, 85553, 10653, 9235, 21668, 17794, 2210, 6169, 10102, 21061, 17662, 1468, 12282, 6350, 9035, 1820, 23652, 7301, 8925, 8701, 3533, 9462, 9123, 12788, 17729, 65552, 1261, 21476, 33770, 9380, 2569654, 33556, 53656, 44143, 32612, 10671, 261, 44570, 41922, 2552, 2417, 19319, 43969, 8921, 8993, 955, 32345, 966, 1920, 17318, 1510, 14180, 26005, 554, 16408, 42028, 112091, 13886, 13942, 1673, 54946 or 2419 gene homologue, such as another 1722, 10280, 59917, 85553, 10653, 9235, 21668, 17794, 2210, 6169, 10102, 21061, 17662, 1468, 12282, 6350, 9035, 1820, 23652, 7301, 8925, 8701, 3533, 9462, 9123, 12788, 17729, 65552, 1261, 21476, 33770, 9380, 2569654, 33556, 53656, 44143, 32612, 10671, 261, 44570, 41922, 2552, 2417, 19319, 43969, 8921, 8993, 955, 32345, 966, 1920, 17318, 1510, 14180, 26005, 554, 16408, 42028, 112091, 13886, 13942, 1673, 54946 or 2419 family member, can be isolated based on hybridization to the 1722, 10280, 59917, 85553, 10653, 9235, 21668, 17794, 2210, 6169, 10102, 21061, 17662, 1468, 12282, 6350, 9035, 1820, 23652, 7301, 8925, 8701, 3533, 9462, 9123, 12788, 17729, 65552, 1261, 21476, 33770, 9380, 2569654, 33556, 53656, 44143, 32612, 10671, 261, 44570, 41922, 2552, 2417, 19319, 43969, 8921, 8993, 955, 32345, 966, 1920, 17318, 1510, 14180, 26005, 554, 16408, 42028, 112091, 13886, 13942, 1673, 54946 or 2419 cDNA sequences and used as a transgene. Intronic sequences and polyadenylation signals can also be included in the transgene to increase the efficiency of expression of the transgene. A tissue-specific regulatory sequence(s) can be operably linked to a 1722, 10280, 59917, 85553, 10653, 9235, 21668, 17794, 2210, 6169, 10102, 21061, 17662, 1468, 12282, 6350, 9035, 1820, 23652, 7301, 8925, 8701, 3533, 9462, 9123, 12788, 17729, 65552, 1261, 21476, 33770, 9380, 2569654, 33556, 53656, 44143, 32612, 10671, 261, 44570, 41922, 2552, 2417, 19319, 43969, 8921, 8993, 955, 32345, 966, 1920, 17318, 1510, 14180, 26005, 554, 16408, 42028, 112091, 13886, 13942, 1673, 54946 or 2419 transgene to direct expression of a 1722, 10280, 59917, 85553, 10653, 9235, 21668, 17794, 2210, 6169, 10102, 21061, 17662, 1468, 12282, 6350, 9035, 1820, 23652, 7301, 8925, 8701, 3533, 9462, 9123, 12788, 17729, 65552, 1261, 21476, 33770, 9380, 2569654, 33556, 53656, 44143, 32612, 10671, 261, 44570, 41922, 2552, 2417, 19319, 43969, 8921, 8993, 955, 32345, 966, 1920, 17318, 1510, 14180, 26005, 554, 16408, 42028, 112091, 13886, 13942, 1673, 54946 or 2419 protein to particular cells. Methods for generating transgenic animals via embryo manipulation and microinjection, particularly animals such as mice, have become conventional in the art and are described, for example, in U.S. Pat. Nos. 4,736,866 and 4, 870, 009, both by Leder et al., U.S. Pat. No. 4,873,191 by Wagner et al. and in Hogan, B., Manipulating the Mouse Embryo, (Cold Spring Harbor Laboratory Press, Cold Spring Harbor, N.Y., 1986). Similar methods are used for production of other transgenic animals. A transgenic founder animal can be identified based upon the presence of a 1722, 10280, 59917, 85553, 10653, 9235, 21668, 17794, 2210, 6169, 10102, 21061, 17662, 1468, 12282, 6350, 9035, 1820, 23652, 7301, 8925, 8701, 3533, 9462, 9123, 12788, 17729, 65552, 1261, 21476, 33770, 9380, 2569654, 33556, 53656, 44143, 32612, 10671, 261, 44570, 41922, 2552, 2417, 19319, 43969, 8921, 8993, 955, 32345, 966, 1920, 17318, 1510, 14180, 26005, 554, 16408, 42028, 112091, 13886, 13942, 1673, 54946 or 2419 transgene in its genome and/or expression of 1722, 10280, 59917, 85553, 10653, 9235, 21668, 17794, 2210, 6169, 10102, 21061, 17662, 1468, 12282, 6350, 9035, 1820, 23652, 7301, 8925, 8701, 3533, 9462, 9123, 12788, 17729, 65552, 1261, 21476, 33770, 9380, 2569654, 33556, 53656, 44143, 32612, 10671, 261, 44570, 41922, 2552, 2417, 19319, 43969, 8921, 8993, 955, 32345, 966, 1920, 17318, 1510, 14180, 26005, 554, 16408, 42028, 112091, 13886, 13942, 1673, 54946 or 2419 mRNA in tissues or cells of the animals. A transgenic founder animal can then be used to breed additional animals carrying the transgene. Moreover, transgenic animals carrying a transgene encoding a 1722, 10280, 59917, 85553, 10653, 9235, 21668, 17794, 2210, 6169, 10102, 21061, 17662, 1468, 12282, 6350, 9035, 1820, 23652, 7301, 8925, 8701, 3533, 9462, 9123, 12788, 17729, 65552, 1261, 21476, 33770, 9380, 2569654, 33556, 53656, 44143, 32612, 10671, 261, 44570, 41922, 2552, 2417, 19319, 43969, 8921, 8993, 955, 32345, 966, 1920, 17318, 1510, 14180, 26005, 554, 16408, 42028, 112091, 13886, 13942, 1673, 54946 or 2419 protein can further be bred to other transgenic animals carrying other transgenes.

[0328] To create a homologous recombinant animal, a vector is prepared which contains at least a portion of a 1722, 10280, 59917, 85553, 10653, 9235, 21668, 17794, 2210, 6169, 10102, 21061, 17662, 1468, 12282, 6350, 9035, 1820, 23652, 7301, 8925, 8701, 3533, 9462, 9123, 12788, 17729, 65552, 1261, 21476, 33770, 9380, 2569654, 33556, 53656, 44143, 32612, 10671, 261, 44570, 41922, 2552, 2417, 19319, 43969, 8921, 8993, 955, 32345, 966, 1920, 17318, 1510, 14180, 26005, 554, 16408, 42028, 112091, 13886, 13942, 1673, 54946 or 2419 gene into which a deletion, addition or substitution has been introduced to thereby alter, e.g., functionally disrupt, the 1722, 10280, 59917, 85553, 10653, 9235, 21668, 17794, 2210, 6169, 10102, 21061, 17662, 1468, 12282, 6350, 9035, 1820, 23652, 7301, 8925, 8701, 3533, 9462, 9123, 12788, 17729, 65552, 1261, 21476, 33770, 9380, 2569654, 33556, 53656, 44143, 32612, 10671, 261, 44570, 41922, 2552, 2417, 19319, 43969, 8921, 8993, 955, 32345, 966, 1920, 17318, 1510, 14180, 26005, 554, 16408, 42028, 112091, 13886, 13942, 1673, 54946 or 2419 gene. The 1722, 10280, 59917, 85553, 10653, 9235, 21668, 17794, 2210, 6169, 10102, 21061, 17662, 1468, 12282, 6350, 9035, 1820, 23652, 7301, 8925, 8701, 3533, 9462, 9123, 12788, 17729, 65552, 1261, 21476, 33770, 9380, 2569654, 33556, 53656, 44143, 32612, 10671, 261, 44570, 41922, 2552, 2417, 19319, 43969, 8921, 8993, 955, 32345, 966, 1920, 17318, 1510, 14180, 26005, 554, 16408, 42028, 112091, 13886, 13942, 1673, 54946 or 2419 gene can be a human gene but more preferably, is a non-human homologue of a human 1722, 10280, 59917, 85553, 10653, 9235, 21668, 17794, 2210, 6169, 10102, 21061, 17662, 1468, 12282, 6350, 9035, 1820, 23652, 7301, 8925, 8701, 3533, 9462, 9123, 12788, 17729, 65552, 1261, 21476, 33770, 9380, 2569654, 33556, 53656, 44143, 32612, 10671, 261, 44570, 41922, 2552, 2417, 19319, 43969, 8921, 8993, 955, 32345, 966, 1920, 17318, 1510, 14180, 26005, 554, 16408, 42028, 112091, 13886, 13942, 1673, 54946 or 2419 gene. For example, a rat 1722, 10280, 59917, 85553, 10653, 9235, 21668, 17794, 2210, 6169, 10102, 21061, 17662, 1468, 12282, 6350, 9035, 1820, 23652, 7301, 8925, 8701, 3533, 9462, 9123, 12788, 17729, 65552, 1261, 21476, 33770, 9380, 2569654, 33556, 53656, 44143, 32612, 10671, 261, 44570, 41922, 2552, 2417, 19319, 43969, 8921, 8993, 955, 32345, 966, 1920, 17318, 1510, 14180, 26005, 554, 16408, 42028, 112091, 13886, 13942, 1673, 54946 or 2419 gene can be used to construct a homologous recombination nucleic acid molecule, e.g., a vector, suitable for altering an endogenous 1722, 10280, 59917, 85553, 10653, 9235, 21668, 17794, 2210, 6169, 10102, 21061, 17662, 1468, 12282, 6350, 9035, 1820, 23652, 7301, 8925, 8701, 3533, 9462, 9123, 12788, 17729, 65552, 1261, 21476, 33770, 9380, 2569654, 33556, 53656, 44143, 32612, 10671, 261, 44570, 41922, 2552, 2417, 19319, 43969, 8921, 8993, 955, 32345, 966, 1920, 17318, 1510, 14180, 26005, 554, 16408, 42028, 112091, 13886, 13942, 1673, 54946 or 2419 gene in the mouse genome. In a preferred embodiment, the homologous recombination nucleic acid molecule is designed such that, upon homologous recombination, the endogenous 1722, 10280, 59917, 85553, 10653, 9235, 21668, 17794, 2210, 6169, 10102, 21061, 17662, 1468, 12282, 6350, 9035, 1820, 23652, 7301, 8925, 8701, 3533, 9462, 9123, 12788, 17729, 65552, 1261, 21476, 33770, 9380, 2569654, 33556, 53656, 44143, 32612, 10671, 261, 44570, 41922, 2552, 2417, 19319, 43969, 8921, 8993, 955, 32345, 966, 1920, 17318, 1510, 14180, 26005, 554, 16408, 42028, 112091, 13886, 13942, 1673, 54946 or 2419 gene is functionally disrupted (i.e., no longer encodes a functional protein; also referred to as a “knock out” vector). Alternatively, the homologous recombination nucleic acid molecule can be designed such that, upon homologous recombination, the endogenous 1722, 10280, 59917, 85553, 10653, 9235, 21668, 17794, 2210, 6169, 10102, 21061, 17662, 1468, 12282, 6350, 9035, 1820, 23652, 7301, 8925, 8701, 3533, 9462, 9123, 12788, 17729, 65552, 1261, 21476, 33770, 9380, 2569654, 33556, 53656, 44143, 32612, 10671, 261, 44570, 41922, 2552, 2417, 19319, 43969, 8921, 8993, 955, 32345, 966, 1920, 17318, 1510, 14180, 26005, 554, 16408, 42028, 112091, 13886, 13942, 1673, 54946 or 2419 gene is mutated or otherwise altered but still encodes functional protein (e.g., the upstream regulatory region can be altered to thereby alter the expression of the endogenous 1722, 10280, 59917, 85553, 10653, 9235, 21668, 17794, 2210, 6169, 10102, 21061, 17662, 1468, 12282, 6350, 9035, 1820, 23652, 7301, 8925, 8701, 3533, 9462, 9123, 12788, 17729, 65552, 1261, 21476, 33770, 9380, 2569654, 33556, 53656, 44143, 32612, 10671, 261, 44570, 41922, 2552, 2417, 19319, 43969, 8921, 8993, 955, 32345, 966, 1920, 17318, 1510, 14180, 26005, 554, 16408, 42028, 112091, 13886, 13942, 1673, 54946 or 2419 protein). In the homologous recombination nucleic acid molecule, the altered portion of the 1722, 10280, 59917, 85553, 10653, 9235, 21668, 17794, 2210, 6169, 10102, 21061, 17662, 1468, 12282, 6350, 9035, 1820, 23652, 7301, 8925, 8701, 3533, 9462, 9123, 12788, 17729, 65552, 1261, 21476, 33770, 9380, 2569654, 33556, 53656, 44143, 32612, 10671, 261, 44570, 41922, 2552, 2417, 19319, 43969, 8921, 8993, 955, 32345, 966, 1920, 17318, 1510, 14180, 26005, 554, 16408, 42028, 112091, 13886, 13942, 1673, 54946 or 2419 gene is flanked at its 5′ and 3′ ends by additional nucleic acid sequence of the 1722, 10280, 59917, 85553, 10653, 9235, 21668, 17794, 2210, 6169, 10102, 21061, 17662, 1468, 12282, 6350, 9035, 1820, 23652, 7301, 8925, 8701, 3533, 9462, 9123, 12788, 17729, 65552, 1261, 21476, 33770, 9380, 2569654, 33556, 53656, 44143, 32612, 10671, 261, 44570, 41922, 2552, 2417, 19319, 43969, 8921, 8993, 955, 32345, 966, 1920, 17318, 1510, 14180, 26005, 554, 16408, 42028, 112091, 13886, 13942, 1673, 54946 or 2419 gene to allow for homologous recombination to occur between the exogenous 1722, 10280, 59917, 85553, 10653, 9235, 21668, 17794, 2210, 6169, 10102, 21061, 17662, 1468, 12282, 6350, 9035, 1820, 23652, 7301, 8925, 8701, 3533, 9462, 9123, 12788, 17729, 65552, 1261, 21476, 33770, 9380, 2569654, 33556, 53656, 44143, 32612, 10671, 261, 44570, 41922, 2552, 2417, 19319, 43969, 8921, 8993, 955, 32345, 966, 1920, 17318, 1510, 14180, 26005, 554, 16408, 42028, 112091, 13886, 13942, 1673, 54946 or 2419 gene carried by the homologous recombination nucleic acid molecule and an endogenous 1722, 10280, 59917, 85553, 10653, 9235, 21668, 17794, 2210, 6169, 10102, 21061, 17662, 1468, 12282, 6350, 9035, 1820, 23652, 7301, 8925, 8701, 3533, 9462, 9123, 12788, 17729, 65552, 1261, 21476, 33770, 9380, 2569654, 33556, 53656, 44143, 32612, 10671, 261, 44570, 41922, 2552, 2417, 19319, 43969, 8921, 8993, 955, 32345, 966, 1920, 17318, 1510, 14180, 26005, 554, 16408, 42028, 112091, 13886, 13942, 1673, 54946 or 2419 gene in a cell, e.g., an embryonic stem cell. The additional flanking 1722, 10280, 59917, 85553, 10653, 9235, 21668, 17794, 2210, 6169, 10102, 21061, 17662, 1468, 12282, 6350, 9035, 1820, 23652, 7301, 8925, 8701, 3533, 9462, 9123, 12788, 17729, 65552, 1261, 21476, 33770, 9380, 2569654, 33556, 53656, 44143, 32612, 10671, 261, 44570, 41922, 2552, 2417, 19319, 43969, 8921, 8993, 955, 32345, 966, 1920, 17318, 1510, 14180, 26005, 554, 16408, 42028, 112091, 13886, 13942, 1673, 54946 or 2419 nucleic acid sequence is of sufficient length for successful homologous recombination with the endogenous gene. Typically, several kilobases of flanking DNA (both at the 5′ and 3′ ends) are included in the homologous recombination nucleic acid molecule (see, e.g., Thomas, K. R. and Capecchi, M. R. (1987) Cell 51:503 for a description of homologous recombination vectors). The homologous recombination nucleic acid molecule is introduced into a cell, e.g., an embryonic stem cell line (e.g., by electroporation) and cells in which the introduced 1722, 10280, 59917, 85553, 10653, 9235, 21668, 17794, 2210, 6169, 10102, 21061, 17662, 1468, 12282, 6350, 9035, 1820, 23652, 7301, 8925, 8701, 3533, 9462, 9123, 12788, 17729, 65552, 1261, 21476, 33770, 9380, 2569654, 33556, 53656, 44143, 32612, 10671, 261, 44570, 41922, 2552, 2417, 19319, 43969, 8921, 8993, 955, 32345, 966, 1920, 17318, 1510, 14180, 26005, 554, 16408, 42028, 112091, 13886, 13942, 1673, 54946 or 2419 gene has homologously recombined with the endogenous 1722, 10280, 59917, 85553, 10653, 9235, 21668, 17794, 2210, 6169, 10102, 21061, 17662, 1468, 12282, 6350, 9035, 1820, 23652, 7301, 8925, 8701, 3533, 9462, 9123, 12788, 17729, 65552, 1261, 21476, 33770, 9380, 2569654, 33556, 53656, 44143, 32612, 10671, 261, 44570, 41922, 2552, 2417, 19319, 43969, 8921, 8993, 955, 32345, 966, 1920, 17318, 1510, 14180, 26005, 554, 16408, 42028, 112091, 13886, 13942, 1673, 54946 or 2419 gene are selected (see e.g., Li, E. et al. (1992) Cell 69:915). The selected cells can then injected into a blastocyst of an animal (e.g., a mouse) to form aggregation chimeras (see e.g., Bradley, A. in Teratocarcinomas and Embryonic Stem Cells: A Practical Approach, E. J. Robertson, ed. (IRL, Oxford, 1987) pp. 113-152). A chimeric embryo can then be implanted into a suitable pseudopregnant female foster animal and the embryo brought to term. Progeny harboring the homologously recombined DNA in their germ cells can be used to breed animals in which all cells of the animal contain the homologously recombined DNA by germline transmission of the transgene. Methods for constructing homologous recombination nucleic acid molecules, e.g., vectors, or homologous recombinant animals are described further in Bradley, A. (1991) Current Opinion in Biotechnology 2:823-829 and in PCT International Publication Nos.: WO 90/11354 by Le Mouellec et al.; WO 91/01140 by Smithies et al.; WO 92/0968 by Zijlstra et al.; and WO 93/04169 by Berns et al.

[0329] In another embodiment, transgenic non-human animals for use in the methods of the invention can be produced which contain selected systems which allow for regulated expression of the transgene. One example of such a system is the cre/loxP recombinase system of bacteriophage P1. For a description of the cre/loxP recombinase system, see, e.g., Lakso et al. (1992) Proc. Natl. Acad. Sci. USA 89:6232-6236. Another example of a recombinase system is the FLP recombinase system of Saccharomyces cerevisiae (O'Gorman et al. (1991) Science 251:1351-1355. If a cre/loxP recombinase system is used to regulate expression of the transgene, animals containing transgenes encoding both the Cre recombinase and a selected protein are required. Such animals can be provided through the construction of “double” transgenic animals, e.g., by mating two transgenic animals, one containing a transgene encoding a selected protein and the other containing a transgene encoding a recombinase.

[0330] Clones of the non-human transgenic animals described herein can also be produced according to the methods described in Wilmut, I. et al. (1997) Nature 385:810-813 and PCT International Publication Nos. WO 97/07668 and WO 97/07669. In brief, a cell, e.g., a somatic cell, from the transgenic animal can be isolated and induced to exit the growth cycle and enter Go phase. The quiescent cell can then be fused, e.g., through the use of electrical pulses, to an enucleated oocyte from an animal of the same species from which the quiescent cell is isolated. The reconstructed oocyte is then cultured such that it develops to morula or blastocyte and then transferred to pseudopregnant female foster animal. The offspring borne of this female foster animal will be a clone of the animal from which the cell, e.g., the somatic cell, is isolated.

[0331] The 1722, 10280, 59917, 85553, 10653, 9235, 21668, 17794, 2210, 6169, 10102, 21061, 17662, 1468, 12282, 6350, 9035, 1820, 23652, 7301, 8925, 8701, 3533, 9462, 9123, 12788, 17729, 65552, 1261, 21476, 33770, 9380, 2569654, 33556, 53656, 44143, 32612, 10671, 261, 44570, 41922, 2552, 2417, 19319, 43969, 8921, 8993, 955, 32345, 966, 1920, 17318, 1510, 14180, 26005, 554, 16408, 42028, 112091, 13886, 13942, 1673, 54946 or 2419 transgenic animals that express 1722, 10280, 59917, 85553, 10653, 9235, 21668, 17794, 2210, 6169, 10102, 21061, 17662, 1468, 12282, 6350, 9035, 1820, 23652, 7301, 8925, 8701, 3533, 9462, 9123, 12788, 17729, 65552, 1261, 21476, 33770, 9380, 2569654, 33556, 53656, 44143, 32612, 10671, 261, 44570, 41922, 2552, 2417, 19319, 43969, 8921, 8993, 955, 32345, 966, 1920, 17318, 1510, 14180, 26005, 554, 16408, 42028, 112091, 13886, 13942, 1673, 54946 or 2419 mRNA or a 1722, 10280, 59917, 85553, 10653, 9235, 21668, 17794, 2210, 6169, 10102, 21061, 17662, 1468, 12282, 6350, 9035, 1820, 23652, 7301, 8925, 8701, 3533, 9462, 9123, 12788, 17729, 65552, 1261, 21476, 33770, 9380, 2569654, 33556, 53656, 44143, 32612, 10671, 261, 44570, 41922, 2552, 2417, 19319, 43969, 8921, 8993, 955, 32345, 966, 1920, 17318, 1510, 14180, 26005, 554, 16408, 42028, 112091, 13886, 13942, 1673, 54946 or 2419 peptide (detected immunocytochemically, using antibodies directed against 1722, 10280, 59917, 85553, 10653, 9235, 21668, 17794, 2210, 6169, 10102, 21061, 17662, 1468, 12282, 6350, 9035, 1820, 23652, 7301, 8925, 8701, 3533, 9462, 9123, 12788, 17729, 65552, 1261, 21476, 33770, 9380, 2569654, 33556, 53656, 44143, 32612, 10671, 261, 44570, 41922, 2552, 2417, 19319, 43969, 8921, 8993, 955, 32345, 966, 1920, 17318, 1510, 14180, 26005, 554, 16408, 42028, 112091, 13886, 13942, 1673, 54946 or 2419 epitopes) at easily detectable levels should then be further evaluated to identify those animals which display characteristic cardiovascular disease symptoms. Such cardiovascular disease symptoms may include, for example, increased prevalence and size of fatty streaks and/or cardiovascular disease plaques.

[0332] Additionally, specific cell types (e.g., endothelial cells) within the transgenic animals may be analyzed and assayed for cellular phenotypes characteristic of cardiovascular disease. In the case of endothelial cells, such phenotypes include, but are not limited to cell proliferation, migration, angiogenesis, production of proinflammatory growth factors and cytokines, and adhesion to inflammatory cells. In the case of monocytes, such phenotypes may include but are not limited to increases in rates of LDL uptake, adhesion to endothelial cells, transmigration, foam cell formation, fatty streak formation, and production of foam cell specific products. Cellular phenotypes may include a particular cell type's pattern of expression of genes associated with cardiovascular disease as compared to known expression profiles of the particular cell type in animals exhibiting cardiovascular disease symptoms.

[0333] B. Cell-Based Systems

[0334] Cells that contain and express 1722, 10280, 59917, 85553, 10653, 9235, 21668, 17794, 2210, 6169, 10102, 21061, 17662, 1468, 12282, 6350, 9035, 1820, 23652, 7301, 8925, 8701, 3533, 9462, 9123, 12788, 17729, 65552, 1261, 21476, 33770, 9380, 2569654, 33556, 53656, 44143, 32612, 10671, 261, 44570, 41922, 2552, 2417, 19319, 43969, 8921, 8993, 955, 32345, 966, 1920, 17318, 1510, 14180, 26005, 554, 16408, 42028, 112091, 13886, 13942, 1673, 54946 or 2419 gene sequences which encode a 1722, 10280, 59917, 85553, 10653, 9235, 21668, 17794, 2210, 6169, 10102, 21061, 17662, 1468, 12282, 6350, 9035, 1820, 23652, 7301, 8925, 8701, 3533, 9462, 9123, 12788, 17729, 65552, 1261, 21476, 33770, 9380, 2569654, 33556, 53656, 44143, 32612, 10671, 261, 44570, 41922, 2552, 2417, 19319, 43969, 8921, 8993, 955, 32345, 966, 1920, 17318, 1510, 14180, 26005, 554, 16408, 42028, 112091, 13886, 13942, 1673, 54946 or 2419 protein, and, further, exhibit cellular phenotypes associated with cardiovascular disease, may be used to identify compounds that exhibit anti-cardiovascular disease activity. Such cells may include non-recombinant monocyte cell lines, such as U937 (ATCC# CRL-1593), THP-1 (ATCC#TIB-202), and P388D1 (ATCC# TIB-63); endothelial cells such as human umbilical vein endothelial cells (HUVECs), human microvascular endothelial cells (HMVEC), and bovine aortic endothelial cells (BAECs); as well as generic mammalian cell lines such as HeLa cells and COS cells, e.g., COS-7 (ATCC# CRL-1651). Further, such cells may include recombinant, transgenic cell lines. For example, the cardiovascular disease animal models of the invention, discussed above, may be used to generate cell lines, containing one or more cell types involved in cardiovascular disease, that can be used as cell culture models for this disorder. While primary cultures derived from the cardiovascular disease transgenic animals of the invention may be utilized, the generation of continuous cell lines is preferred. For examples of techniques which may be used to derive a continuous cell line from the transgenic animals, see Small et al., (1985) Mol. Cell Biol. 5:642-648.

[0335] Alternatively, cells of a cell type known to be involved in cardiovascular disease may be transfected with sequences capable of increasing or decreasing the amount of 1722, 10280, 59917, 85553, 10653, 9235, 21668, 17794, 2210, 6169, 10102, 21061, 17662, 1468, 12282, 6350, 9035, 1820, 23652, 7301, 8925, 8701, 3533, 9462, 9123, 12788, 17729, 65552, 1261, 21476, 33770, 9380, 2569654, 33556, 53656, 44143, 32612, 10671, 261, 44570, 41922, 2552, 2417, 19319, 43969, 8921, 8993, 955, 32345, 966, 1920, 17318, 1510, 14180, 26005, 554, 16408, 42028, 112091, 13886, 13942, 1673, 54946 or 2419 gene expression within the cell. For example, 1722, 10280, 59917, 85553, 10653, 9235, 21668, 17794, 2210, 6169, 10102, 21061, 17662, 1468, 12282, 6350, 9035, 1820, 23652, 7301, 8925, 8701, 3533, 9462, 9123, 12788, 17729, 65552, 1261, 21476, 33770, 9380, 2569654, 33556, 53656, 44143, 32612, 10671, 261, 44570, 41922, 2552, 2417, 19319, 43969, 8921, 8993, 955, 32345, 966, 1920, 17318, 1510, 14180, 26005, 554, 16408, 42028, 112091, 13886, 13942, 1673, 54946 or 2419 gene sequences may be introduced into, and overexpressed in, the genome of the cell of interest, or, if endogenous 1722, 10280, 59917, 85553, 10653, 9235, 21668, 17794, 2210, 6169, 10102, 21061, 17662, 1468, 12282, 6350, 9035, 1820, 23652, 7301, 8925, 8701, 3533, 9462, 9123, 12788, 17729, 65552, 1261, 21476, 33770, 9380, 2569654, 33556, 53656, 44143, 32612, 10671, 261, 44570, 41922, 2552, 2417, 19319, 43969, 8921, 8993, 955, 32345, 966, 1920, 17318, 1510, 14180, 26005, 554, 16408, 42028, 112091, 13886, 13942, 1673, 54946 or 2419 gene sequences are present, they may be either overexpressed or, alternatively disrupted in order to underexpress or inactivate 1722, 10280, 59917, 85553, 10653, 9235, 21668, 17794, 2210, 6169, 10102, 21061, 17662, 1468, 12282, 6350, 9035, 1820, 23652, 7301, 8925, 8701, 3533, 9462, 9123, 12788, 17729, 65552, 1261, 21476, 33770, 9380, 2569654, 33556, 53656, 44143, 32612, 10671, 261, 44570, 41922, 2552, 2417, 19319, 43969, 8921, 8993, 955, 32345, 966, 1920, 17318, 1510, 14180, 26005, 554, 16408, 42028, 112091, 13886, 13942, 1673, 54946 or 2419 gene expression.

[0336] In order to overexpress a 1722, 10280, 59917, 85553, 10653, 9235, 21668, 17794, 2210, 6169, 10102, 21061, 17662, 1468, 12282, 6350, 9035, 1820, 23652, 7301, 8925, 8701, 3533, 9462, 9123, 12788, 17729, 65552, 1261, 21476, 33770, 9380, 2569654, 33556, 53656, 44143, 32612, 10671, 261, 44570, 41922, 2552, 2417, 19319, 43969, 8921, 8993, 955, 32345, 966, 1920, 17318, 1510, 14180, 26005, 554, 16408, 42028, 112091, 13886, 13942, 1673, 54946 or 2419 gene, the coding portion of the 1722, 10280, 59917, 85553, 10653, 9235, 21668, 17794, 2210, 6169, 10102, 21061, 17662, 1468, 12282, 6350, 9035, 1820, 23652, 7301, 8925, 8701, 3533, 9462, 9123, 12788, 17729, 65552, 1261, 21476, 33770, 9380, 2569654, 33556, 53656, 44143, 32612, 10671, 261, 44570, 41922, 2552, 2417, 19319, 43969, 8921, 8993, 955, 32345, 966, 1920, 17318, 1510, 14180, 26005, 554, 16408, 42028, 112091, 13886, 13942, 1673, 54946 or 2419 gene may be ligated to a regulatory sequence which is capable of driving gene expression in the cell type of interest, e.g., an endothelial cell. Such regulatory regions will be well known to those of skill in the art, and may be utilized in the absence of undue experimentation. Recombinant methods for expressing target genes are described above.

[0337] For underexpression of an endogenous 1722, 10280, 59917, 85553, 10653, 9235, 21668, 17794, 2210, 6169, 10102, 21061, 17662, 1468, 12282, 6350, 9035, 1820, 23652, 7301, 8925, 8701, 3533, 9462, 9123, 12788, 17729, 65552, 1261, 21476, 33770, 9380, 2569654, 33556, 53656, 44143, 32612, 10671, 261, 44570, 41922, 2552, 2417, 19319, 43969, 8921, 8993, 955, 32345, 966, 1920, 17318, 1510, 14180, 26005, 554, 16408, 42028, 112091, 13886, 13942, 1673, 54946 or 2419 gene sequence, such a sequence may be isolated and engineered such that when reintroduced into the genome of the cell type of interest, the endogenous 1722, 10280, 59917, 85553, 10653, 9235, 21668, 17794, 2210, 6169, 10102, 21061, 17662, 1468, 12282, 6350, 9035, 1820, 23652, 7301, 8925, 8701, 3533, 9462, 9123, 12788, 17729, 65552, 1261, 21476, 33770, 9380, 2569654, 33556, 53656, 44143, 32612, 10671, 261, 44570, 41922, 2552, 2417, 19319, 43969, 8921, 8993, 955, 32345, 966, 1920, 17318, 1510, 14180, 26005, 554, 16408, 42028, 112091, 13886, 13942, 1673, 54946 or 2419 alleles will be inactivated. Preferably, the engineered 1722, 10280, 59917, 85553, 10653, 9235, 21668, 17794, 2210, 6169, 10102, 21061, 17662, 1468, 12282, 6350, 9035, 1820, 23652, 7301, 8925, 8701, 3533, 9462, 9123, 12788, 17729, 65552, 1261, 21476, 33770, 9380, 2569654, 33556, 53656, 44143, 32612, 10671, 261, 44570, 41922, 2552, 2417, 19319, 43969, 8921, 8993, 955, 32345, 966, 1920, 17318, 1510, 14180, 26005, 554, 16408, 42028, 112091, 13886, 13942, 1673, 54946 or 2419 sequence is introduced via gene targeting such that the endogenous 1722, 10280, 59917, 85553, 10653, 9235, 21668, 17794, 2210, 6169, 10102, 21061, 17662, 1468, 12282, 6350, 9035, 1820, 23652, 7301, 8925, 8701, 3533, 9462, 9123, 12788, 17729, 65552, 1261, 21476, 33770, 9380, 2569654, 33556, 53656, 44143, 32612, 10671, 261, 44570, 41922, 2552, 2417, 19319, 43969, 8921, 8993, 955, 32345, 966, 1920, 17318, 1510, 14180, 26005, 554, 16408, 42028, 112091, 13886, 13942, 1673, 54946 or 2419 sequence is disrupted upon integration of the engineered 1722, 10280, 59917, 85553, 10653, 9235, 21668, 17794, 2210, 6169, 10102, 21061, 17662, 1468, 12282, 6350, 9035, 1820, 23652, 7301, 8925, 8701, 3533, 9462, 9123, 12788, 17729, 65552, 1261, 21476, 33770, 9380, 2569654, 33556, 53656, 44143, 32612, 10671, 261, 44570, 41922, 2552, 2417, 19319, 43969, 8921, 8993, 955, 32345, 966, 1920, 17318, 1510, 14180, 26005, 554, 16408, 42028, 112091, 13886, 13942, 1673, 54946 or 2419 sequence into the cell's genome. Transfection of host cells with 1722, 10280, 59917, 85553, 10653, 9235, 21668, 17794, 2210, 6169, 10102, 21061, 17662, 1468, 12282, 6350, 9035, 1820, 23652, 7301, 8925, 8701, 3533, 9462, 9123, 12788, 17729, 65552, 1261, 21476, 33770, 9380, 2569654, 33556, 53656, 44143, 32612, 10671, 261, 44570, 41922, 2552, 2417, 19319, 43969, 8921, 8993, 955, 32345, 966, 1920, 17318, 1510, 14180, 26005, 554, 16408, 42028, 112091, 13886, 13942, 1673, 54946 or 2419 genes is discussed, above.

[0338] Cells treated with compounds or transfected with 1722, 10280, 59917, 85553, 10653, 9235, 21668, 17794, 2210, 6169, 10102, 21061, 17662, 1468, 12282, 6350, 9035, 1820, 23652, 7301, 8925, 8701, 3533, 9462, 9123, 12788, 17729, 65552, 1261, 21476, 33770, 9380, 2569654, 33556, 53656, 44143, 32612, 10671, 261, 44570, 41922, 2552, 2417, 19319, 43969, 8921, 8993, 955, 32345, 966, 1920, 17318, 1510, 14180, 26005, 554, 16408, 42028, 112091, 13886, 13942, 1673, 54946 or 2419 genes can be examined for phenotypes associated with cardiovascular disease. In the case of monocytes, such phenotypes include but are not limited to increases in rates of LDL uptake, adhesion to endothelial cells, transmigration, foam cell formation, fatty streak formation, and production by foam cells of growth factors such as bFGF, IGF-I, VEGF, IL-1, M-CSF, TGFβ, TGFα, TNFα, HB-EGF, PDGF, IFN-γ, and GM-CSF. Transmigration rates, for example, may be measured using the in vitro system of Navab et al. (1988) J. Clin. Invest. 82:1853-1863, by quantifying the number of monocytes that migrate across the endothelial monolayer and into the collagen layer of the subendothelial space.

[0339] Similarly, endothelial cells can be treated with test compounds or transfected with genetically engineered 1722, 10280, 59917, 85553, 10653, 9235, 21668, 17794, 2210, 6169, 10102, 21061, 17662, 1468, 12282, 6350, 9035, 1820, 23652, 7301, 8925, 8701, 3533, 9462, 9123, 12788, 17729, 65552, 1261, 21476, 33770, 9380, 2569654, 33556, 53656, 44143, 32612, 10671, 261, 44570, 41922, 2552, 2417, 19319, 43969, 8921, 8993, 955, 32345, 966, 1920, 17318, 1510, 14180, 26005, 554, 16408, 42028, 112091, 13886, 13942, 1673, 54946 or 2419 genes. The endothelial cells can then be examined for phenotypes associated with cardiovascular disease, including, but not limited to changes in cellular morphology, cell proliferation, cell migration, and mononuclear cell adhesion; or for the effects on production of other proteins involved in cardiovascular disease such as adhesion molecules (e.g., ICAM, VCAM, E-selectin), growth factors and cytokines (e.g., PDGF, IL-1β, TNFα, MCF), and proteins involved in angiogenesis (e.g., FLK, FLT).

[0340] Transfection of 1722, 10280, 59917, 85553, 10653, 9235, 21668, 17794, 2210, 6169, 10102, 21061, 17662, 1468, 12282, 6350, 9035, 1820, 23652, 7301, 8925, 8701, 3533, 9462, 9123, 12788, 17729, 65552, 1261, 21476, 33770, 9380, 2569654, 33556, 53656, 44143, 32612, 10671, 261, 44570, 41922, 2552, 2417, 19319, 43969, 8921, 8993, 955, 32345, 966, 1920, 17318, 1510, 14180, 26005, 554, 16408, 42028, 112091, 13886, 13942, 1673, 54946 or 2419 nucleic acid may be accomplished by using standard techniques (described in, for example, Ausubel (1989) supra). Transfected cells should be evaluated for the presence of the recombinant 1722, 10280, 59917, 85553, 10653, 9235, 21668, 17794, 2210, 6169, 10102, 21061, 17662, 1468, 12282, 6350, 9035, 1820, 23652, 7301, 8925, 8701, 3533, 9462, 9123, 12788, 17729, 65552, 1261, 21476, 33770, 9380, 2569654, 33556, 53656, 44143, 32612, 10671, 261, 44570, 41922, 2552, 2417, 19319, 43969, 8921, 8993, 955, 32345, 966, 1920, 17318, 1510, 14180, 26005, 554, 16408, 42028, 112091, 13886, 13942, 1673, 54946 or 2419 gene sequences, for expression and accumulation of 1722, 10280, 59917, 85553, 10653, 9235, 21668, 17794, 2210, 6169, 10102, 21061, 17662, 1468, 12282, 6350, 9035, 1820, 23652, 7301, 8925, 8701, 3533, 9462, 9123, 12788, 17729, 65552, 1261, 21476, 33770, 9380, 2569654, 33556, 53656, 44143, 32612, 10671, 261, 44570, 41922, 2552, 2417, 19319, 43969, 8921, 8993, 955, 32345, 966, 1920, 17318, 1510, 14180, 26005, 554, 16408, 42028, 112091, 13886, 13942, 1673, 54946 or 2419 mRNA, and for the presence of recombinant 1722, 10280, 59917, 85553, 10653, 9235, 21668, 17794, 2210, 6169, 10102, 21061, 17662, 1468, 12282, 6350, 9035, 1820, 23652, 7301, 8925, 8701, 3533, 9462, 9123, 12788, 17729, 65552, 1261, 21476, 33770, 9380, 2569654, 33556, 53656, 44143, 32612, 10671, 261, 44570, 41922, 2552, 2417, 19319, 43969, 8921, 8993, 955, 32345, 966, 1920, 17318, 1510, 14180, 26005, 554, 16408, 42028, 112091, 13886, 13942, 1673, 54946 or 2419 protein production. In instances wherein a decrease in 1722, 10280, 59917, 85553, 10653, 9235, 21668, 17794, 2210, 6169, 10102, 21061, 17662, 1468, 12282, 6350, 9035, 1820, 23652, 7301, 8925, 8701, 3533, 9462, 9123, 12788, 17729, 65552, 1261, 21476, 33770, 9380, 2569654, 33556, 53656, 44143, 32612, 10671, 261, 44570, 41922, 2552, 2417, 19319, 43969, 8921, 8993, 955, 32345, 966, 1920, 17318, 1510, 14180, 26005, 554, 16408, 42028, 112091, 13886, 13942, 1673, 54946 or 2419 gene expression is desired, standard techniques may be used to demonstrate whether a decrease in endogenous 1722, 10280, 59917, 85553, 10653, 9235, 21668, 17794, 2210, 6169, 10102, 21061, 17662, 1468, 12282, 6350, 9035, 1820, 23652, 7301, 8925, 8701, 3533, 9462, 9123, 12788, 17729, 65552, 1261, 21476, 33770, 9380, 2569654, 33556, 53656, 44143, 32612, 10671, 261, 44570, 41922, 2552, 2417, 19319, 43969, 8921, 8993, 955, 32345, 966, 1920, 17318, 1510, 14180, 26005, 554, 16408, 42028, 112091, 13886, 13942, 1673, 54946 or 2419 gene expression and/or in 1722, 10280, 59917, 85553, 10653, 9235, 21668, 17794, 2210, 6169, 10102, 21061, 17662, 1468, 12282, 6350, 9035, 1820, 23652, 7301, 8925, 8701, 3533, 9462, 9123, 12788, 17729, 65552, 1261, 21476, 33770, 9380, 2569654, 33556, 53656, 44143, 32612, 10671, 261, 44570, 41922, 2552, 2417, 19319, 43969, 8921, 8993, 955, 32345, 966, 1920, 17318, 1510, 14180, 26005, 554, 16408, 42028, 112091, 13886, 13942, 1673, 54946 or 2419 protein production is achieved.

[0341] Cellular models for the study of cardiovascular disease and angiogenesis include models of endothelial cell differentiation on Matrigel (Baatout, S. et al. (1996) Rom. J. Intern. Med. 34:263-269; Benelli, R et al. (1999) Int. J. Biol. Markers 14:243-246), embryonic stem cell models of vascular morphogenesis (Doetschman, T. et al. (1993) Hypertension 22:618-629), the culture of microvessel fragments in physiological gels (Hoying, J B et al. (1996) In Vitro Cell Dev. Biol. Anim. 32: 409-419; U.S. Pat. No. 5,976,782), and the treatment of endothelial cells and smooth muscle cells with atherogenic and angiogenic factors including growth factors and cytokines (e.g., IL-1β, PDGF, TNFα, VEGF), homocysteine, and LDL. In vitro angiogenesis models are described in, for example, Black, AF et al. (1999) Cell Biol. Toxicol. 15:81-90.

[0342] Also provided are cells or a purified preparation thereof, e.g., human cells, in which an endogenous 1722, 10280, 59917, 85553, 10653, 9235, 21668, 17794, 2210, 6169, 10102, 21061, 17662, 1468, 12282, 6350, 9035, 1820, 23652, 7301, 8925, 8701, 3533, 9462, 9123, 12788, 17729, 65552, 1261, 21476, 33770, 9380, 2569654, 33556, 53656, 44143, 32612, 10671, 261, 44570, 41922, 2552, 2417, 19319, 43969, 8921, 8993, 955, 32345, 966, 1920, 17318, 1510, 14180, 26005, 554, 16408, 42028, 112091, 13886, 13942, 1673, 54946 or 2419 is under the control of a regulatory sequence that does not normally control the expression of the endogenous 1722, 10280, 59917, 85553, 10653, 9235, 21668, 17794, 2210, 6169, 10102, 21061, 17662, 1468, 12282, 6350, 9035, 1820, 23652, 7301, 8925, 8701, 3533, 9462, 9123, 12788, 17729, 65552, 1261, 21476, 33770, 9380, 2569654, 33556, 53656, 44143, 32612, 10671, 261, 44570, 41922, 2552, 2417, 19319, 43969, 8921, 8993, 955, 32345, 966, 1920, 17318, 1510, 14180, 26005, 554, 16408, 42028, 112091, 13886, 13942, 1673, 54946 or 2419 gene. The expression characteristics of an endogenous gene within a cell, e.g., a cell line or microorganism, can be modified by inserting a heterologous DNA regulatory element into the genome of the cell such that the inserted regulatory element is operably linked to the endogenous 1722, 10280, 59917, 85553, 10653, 9235, 21668, 17794, 2210, 6169, 10102, 21061, 17662, 1468, 12282, 6350, 9035, 1820, 23652, 7301, 8925, 8701, 3533, 9462, 9123, 12788, 17729, 65552, 1261, 21476, 33770, 9380, 2569654, 33556, 53656, 44143, 32612, 10671, 261, 44570, 41922, 2552, 2417, 19319, 43969, 8921, 8993, 955, 32345, 966, 1920, 17318, 1510, 14180, 26005, 554, 16408, 42028, 112091, 13886, 13942, 1673, 54946 or 2419 gene. For example, an endogenous 1722, 10280, 59917, 85553, 10653, 9235, 21668, 17794, 2210, 6169, 10102, 21061, 17662, 1468, 12282, 6350, 9035, 1820, 23652, 7301, 8925, 8701, 3533, 9462, 9123, 12788, 17729, 65552, 1261, 21476, 33770, 9380, 2569654, 33556, 53656, 44143, 32612, 10671, 261, 44570, 41922, 2552, 2417, 19319, 43969, 8921, 8993, 955, 32345, 966, 1920, 17318, 1510, 14180, 26005, 554, 16408, 42028, 112091, 13886, 13942, 1673, 54946 or 2419 gene, e.g., a gene which is “transcriptionally silent,” e.g., not normally expressed, or expressed only at very low levels, may be activated by inserting a regulatory element which is capable of promoting the expression of a normally expressed gene product in that cell. Techniques such as targeted homologous recombinations, can be used to insert the heterologous DNA as described in, e.g., Chappel, U.S. Pat. No. 5,272,071; WO 91/06667, published on May 16, 1991.

[0343] III. Predictive Medicine:

[0344] The present invention also pertains to the field of predictive medicine in which diagnostic assays, prognostic assays, and monitoring clinical trials are used for prognostic (predictive) purposes to thereby treat an individual prophylactically. Accordingly, one aspect of the present invention relates to diagnostic assays for determining 1722, 10280, 59917, 85553, 10653, 9235, 21668, 17794, 2210, 6169, 10102, 21061, 17662, 1468, 12282, 6350, 9035, 1820, 23652, 7301, 8925, 8701, 3533, 9462, 9123, 12788, 17729, 65552, 1261, 21476, 33770, 9380, 2569654, 33556, 53656, 44143, 32612, 10671, 261, 44570, 41922, 2552, 2417, 19319, 43969, 8921, 8993, 955, 32345, 966, 1920, 17318, 1510, 14180, 26005, 554, 16408, 42028, 112091, 13886, 13942, 1673, 54946 or 2419 protein and/or nucleic acid expression as well as 1722, 10280, 59917, 85553, 10653, 9235, 21668, 17794, 2210, 6169, 10102, 21061, 17662, 1468, 12282, 6350, 9035, 1820, 23652, 7301, 8925, 8701, 3533, 9462, 9123, 12788, 17729, 65552, 1261, 21476, 33770, 9380, 2569654, 33556, 53656, 44143, 32612, 10671, 261, 44570, 41922, 2552, 2417, 19319, 43969, 8921, 8993, 955, 32345, 966, 1920, 17318, 1510, 14180, 26005, 554, 16408, 42028, 112091, 13886, 13942, 1673, 54946 or 2419 activity, in the context of a biological sample (e.g., blood, serum, cells, e.g., endothelial cells, or tissue, e.g., vascular tissue) to thereby determine whether an individual is afflicted with a cardiovascular disease. The invention also provides for prognostic (or predictive) assays for determining whether an individual is at risk of developing a cardiovascular disorder. For example, mutations in a 1722, 10280, 59917, 85553, 10653, 9235, 21668, 17794, 2210, 6169, 10102, 21061, 17662, 1468, 12282, 6350, 9035, 1820, 23652, 7301, 8925, 8701, 3533, 9462, 9123, 12788, 17729, 65552, 1261, 21476, 33770, 9380, 2569654, 33556, 53656, 44143, 32612, 10671, 261, 44570, 41922, 2552, 2417, 19319, 43969, 8921, 8993, 955, 32345, 966, 1920, 17318, 1510, 14180, 26005, 554, 16408, 42028, 112091, 13886, 13942, 1673, 54946 or 2419 gene can be assayed for in a biological sample. Such assays can be used for prognostic or predictive purpose to thereby phophylactically treat an individual prior to the onset of a cardiovascular disorder, e.g., atherosclerosis.

[0345] Another aspect of the invention pertains to monitoring the influence of 1722, 10280, 59917, 85553, 10653, 9235, 21668, 17794, 2210, 6169, 10102, 21061, 17662, 1468, 12282, 6350, 9035, 1820, 23652, 7301, 8925, 8701, 3533, 9462, 9123, 12788, 17729, 65552, 1261, 21476, 33770, 9380, 2569654, 33556, 53656, 44143, 32612, 10671, 261, 44570, 41922, 2552, 2417, 19319, 43969, 8921, 8993, 955, 32345, 966, 1920, 17318, 1510, 14180, 26005, 554, 16408, 42028, 112091, 13886, 13942, 1673, 54946 or 2419 modulators (e.g., anti-1722, 10280, 59917, 85553, 10653, 9235, 21668, 17794, 2210, 6169, 10102, 21061, 17662, 1468, 12282, 6350, 9035, 1820, 23652, 7301, 8925, 8701, 3533, 9462, 9123, 12788, 17729, 65552, 1261, 21476, 33770, 9380, 2569654, 33556, 53656, 44143, 32612, 10671, 261, 44570, 41922, 2552, 2417, 19319, 43969, 8921, 8993, 955, 32345, 966, 1920, 17318, 1510, 14180, 26005, 554, 16408, 42028, 112091, 13886, 13942, 1673, 54946 or 2419 antibodies or 1722, 10280, 59917, 85553, 10653, 9235, 21668, 17794, 2210, 6169, 10102, 21061, 17662, 1468, 12282, 6350, 9035, 1820, 23652, 7301, 8925, 8701, 3533, 9462, 9123, 12788, 17729, 65552, 1261, 21476, 33770, 9380, 2569654, 33556, 53656, 44143, 32612, 10671, 261, 44570, 41922, 2552, 2417, 19319, 43969, 8921, 8993, 955, 32345, 966, 1920, 17318, 1510, 14180, 26005, 554, 16408, 42028, 112091, 13886, 13942, 1673, 54946 or 2419 ribozymes) on the expression or activity of 1722, 10280, 59917, 85553, 10653, 9235, 21668, 17794, 2210, 6169, 10102, 21061, 17662, 1468, 12282, 6350, 9035, 1820, 23652, 7301, 8925, 8701, 3533, 9462, 9123, 12788, 17729, 65552, 1261, 21476, 33770, 9380, 2569654, 33556, 53656, 44143, 32612, 10671, 261, 44570, 41922, 2552, 2417, 19319, 43969, 8921, 8993, 955, 32345, 966, 1920, 17318, 1510, 14180, 26005, 554, 16408, 42028, 112091, 13886, 13942, 1673, 54946 or 2419 in clinical trials.

[0346] These and other agents are described in further detail in the following sections.

[0347] A. Diagnostic Assays For Cardiovascular Disease

[0348] To determine whether a subject is afflicted with a cardiovascular disease, a biological sample may be obtained from a subject and the biological sample may be contacted with a compound or an agent capable of detecting a 1722, 10280, 59917, 85553, 10653, 9235, 21668, 17794, 2210, 6169, 10102, 21061, 17662, 1468, 12282, 6350, 9035, 1820, 23652, 7301, 8925, 8701, 3533, 9462, 9123, 12788, 17729, 65552, 1261, 21476, 33770, 9380, 2569654, 33556, 53656, 44143, 32612, 10671, 261, 44570, 41922, 2552, 2417, 19319, 43969, 8921, 8993, 955, 32345, 966, 1920, 17318, 1510, 14180, 26005, 554, 16408, 42028, 112091, 13886, 13942, 1673, 54946 or 2419 protein or nucleic acid (e.g., mRNA or genomic DNA) that encodes a 1722, 10280, 59917, 85553, 10653, 9235, 21668, 17794, 2210, 6169, 10102, 21061, 17662, 1468, 12282, 6350, 9035, 1820, 23652, 7301, 8925, 8701, 3533, 9462, 9123, 12788, 17729, 65552, 1261, 21476, 33770, 9380, 2569654, 33556, 53656, 44143, 32612, 10671, 261, 44570, 41922, 2552, 2417, 19319, 43969, 8921, 8993, 955, 32345, 966, 1920, 17318, 1510, 14180, 26005, 554, 16408, 42028, 112091, 13886, 13942, 1673, 54946 or 2419 protein, in the biological sample. A preferred agent for detecting 1722, 10280, 59917, 85553, 10653, 9235, 21668, 17794, 2210, 6169, 10102, 21061, 17662, 1468, 12282, 6350, 9035, 1820, 23652, 7301, 8925, 8701, 3533, 9462, 9123, 12788, 17729, 65552, 1261, 21476, 33770, 9380, 2569654, 33556, 53656, 44143, 32612, 10671, 261, 44570, 41922, 2552, 2417, 19319, 43969, 8921, 8993, 955, 32345, 966, 1920, 17318, 1510, 14180, 26005, 554, 16408, 42028, 112091, 13886, 13942, 1673, 54946 or 2419 mRNA or genomic DNA is a labeled nucleic acid probe capable of hybridizing to 1722, 10280, 59917, 85553, 10653, 9235, 21668, 17794, 2210, 6169, 10102, 21061, 17662, 1468, 12282, 6350, 9035, 1820, 23652, 7301, 8925, 8701, 3533, 9462, 9123, 12788, 17729, 65552, 1261, 21476, 33770, 9380, 2569654, 33556, 53656, 44143, 32612, 10671, 261, 44570, 41922, 2552, 2417, 19319, 43969, 8921, 8993, 955, 32345, 966, 1920, 17318, 1510, 14180, 26005, 554, 16408, 42028, 112091, 13886, 13942, 1673, 54946 or 2419 mRNA or genomic DNA. The nucleic acid probe can be, for example, the 1722, 10280, 59917, 85553, 10653, 9235, 21668, 17794, 2210, 6169, 10102, 21061, 17662, 1468, 12282, 6350, 9035, 1820, 23652, 7301, 8925, 8701, 3533, 9462, 9123, 12788, 17729, 65552, 1261, 21476, 33770, 9380, 2569654, 33556, 53656, 44143, 32612, 10671, 261, 44570, 41922, 2552, 2417, 19319, 43969, 8921, 8993, 955, 32345, 966, 1920, 17318, 1510, 14180, 26005, 554, 16408, 42028, 112091, 13886, 13942, 1673, 54946 or 2419 nucleic acid set forth in SEQ ID NO:1, 3, 5, 7, 9, 11, 13, 15, 17, 19, 21, 23, 25, 27, 29, 31, 33, 35, 37, 39, 41, 43, 45, 47, 49, 51, 53, 55, 57, 59, 61, 63, 65, 67, 69, 71, 73, 75, 77, 79, 81, 83, 85, 87, 89, 91, 93, 95, 97, 99, 101, 103, 105, 107, 109, 111, 113, 115, 117, 119, 121, 123, 125 or 127 or a portion thereof, such as an oligonucleotide of at least 15, 20, 25, 30, 25, 40, 45, 50, 100, 250 or 500 nucleotides in length and sufficient to specifically hybridize under stringent conditions to 1722, 10280, 59917, 85553, 10653, 9235, 21668, 17794, 2210, 6169, 10102, 21061, 17662, 1468, 12282, 6350, 9035, 1820, 23652, 7301, 8925, 8701, 3533, 9462, 9123, 12788, 17729, 65552, 1261, 21476, 33770, 9380, 2569654, 33556, 53656, 44143, 32612, 10671, 261, 44570, 41922, 2552, 2417, 19319, 43969, 8921, 8993, 955, 32345, 966, 1920, 17318, 1510, 14180, 26005, 554, 16408, 42028, 112091, 13886, 13942, 1673, 54946 or 2419 mRNA or genomic DNA. Other suitable probes for use in the diagnostic assays of the invention are described herein.

[0349] A preferred agent for detecting 1722, 10280, 59917, 85553, 10653, 9235, 21668, 17794, 2210, 6169, 10102, 21061, 17662, 1468, 12282, 6350, 9035, 1820, 23652, 7301, 8925, 8701, 3533, 9462, 9123, 12788, 17729, 65552, 1261, 21476, 33770, 9380, 2569654, 33556, 53656, 44143, 32612, 10671, 261, 44570, 41922, 2552, 2417, 19319, 43969, 8921, 8993, 955, 32345, 966, 1920, 17318, 1510, 14180, 26005, 554, 16408, 42028, 112091, 13886, 13942, 1673, 54946 or 2419 protein in a sample is an antibody capable of binding to 1722, 10280, 59917, 85553, 10653, 9235, 21668, 17794, 2210, 6169, 10102, 21061, 17662, 1468, 12282, 6350, 9035, 1820, 23652, 7301, 8925, 8701, 3533, 9462, 9123, 12788, 17729, 65552, 1261, 21476, 33770, 9380, 2569654, 33556, 53656, 44143, 32612, 10671, 261, 44570, 41922, 2552, 2417, 19319, 43969, 8921, 8993, 955, 32345, 966, 1920, 17318, 1510, 14180, 26005, 554, 16408, 42028, 112091, 13886, 13942, 1673, 54946 or 2419 protein, preferably an antibody with a detectable label. Antibodies can be polyclonal, or more preferably, monoclonal. An intact antibody, or a fragment thereof (e.g., Fab or F(ab′)2) can be used. The term “labeled”, with regard to the probe or antibody, is intended to encompass direct labeling of the probe or antibody by coupling (i.e., physically linking) a detectable substance to the probe or antibody, as well as indirect labeling of the probe or antibody by reactivity with another reagent that is directly labeled. Examples of indirect labeling include detection of a primary antibody using a fluorescently labeled secondary antibody and end-labeling of a DNA probe with biotin such that it can be detected with fluorescently labeled streptavidin.

[0350] The term “biological sample” is intended to include tissues, cells, and biological fluids isolated from a subject, as well as tissues, cells, and fluids present within a subject. That is, the detection method of the invention can be used to detect 1722, 10280, 59917, 85553, 10653, 9235, 21668, 17794, 2210, 6169, 10102, 21061, 17662, 1468, 12282, 6350, 9035, 1820, 23652, 7301, 8925, 8701, 3533, 9462, 9123, 12788, 17729, 65552, 1261, 21476, 33770, 9380, 2569654, 33556, 53656, 44143, 32612, 10671, 261, 44570, 41922, 2552, 2417, 19319, 43969, 8921, 8993, 955, 32345, 966, 1920, 17318, 1510, 14180, 26005, 554, 16408, 42028, 112091, 13886, 13942, 1673, 54946 or 2419 mRNA, protein, or genomic DNA in a biological sample in vitro as well as in vivo. For example, in vitro techniques for detection of 1722, 10280, 59917, 85553, 10653, 9235, 21668, 17794, 2210, 6169, 10102, 21061, 17662, 1468, 12282, 6350, 9035, 1820, 23652, 7301, 8925, 8701, 3533, 9462, 9123, 12788, 17729, 65552, 1261, 21476, 33770, 9380, 2569654, 33556, 53656, 44143, 32612, 10671, 261, 44570, 41922, 2552, 2417, 19319, 43969, 8921, 8993, 955, 32345, 966, 1920, 17318, 1510, 14180, 26005, 554, 16408, 42028, 112091, 13886, 13942, 1673, 54946 or 2419 mRNA include Northern hybridizations and in situ hybridizations. In vitro techniques for detection of 1722, 10280, 59917, 85553, 10653, 9235, 21668, 17794, 2210, 6169, 10102, 21061, 17662, 1468, 12282, 6350, 9035, 1820, 23652, 7301, 8925, 8701, 3533, 9462, 9123, 12788, 17729, 65552, 1261, 21476, 33770, 9380, 2569654, 33556, 53656, 44143, 32612, 10671, 261, 44570, 41922, 2552, 2417, 19319, 43969, 8921, 8993, 955, 32345, 966, 1920, 17318, 1510, 14180, 26005, 554, 16408, 42028, 112091, 13886, 13942, 1673, 54946 or 2419 protein include enzyme linked immunosorbent assays (ELISAs), Western blots, immunoprecipitations and immunofluorescence. In vitro techniques for detection of 1722, 10280, 59917, 85553, 10653, 9235, 21668, 17794, 2210, 6169, 10102, 21061, 17662, 1468, 12282, 6350, 9035, 1820, 23652, 7301, 8925, 8701, 3533, 9462, 9123, 12788, 17729, 65552, 1261, 21476, 33770, 9380, 2569654, 33556, 53656, 44143, 32612, 10671, 261, 44570, 41922, 2552, 2417, 19319, 43969, 8921, 8993, 955, 32345, 966, 1920, 17318, 1510, 14180, 26005, 554, 16408, 42028, 112091, 13886, 13942, 1673, 54946 or 2419 genomic DNA include Southern hybridizations. Furthermore, in vivo techniques for detection of 1722, 10280, 59917, 85553, 10653, 9235, 21668, 17794, 2210, 6169, 10102, 21061, 17662, 1468, 12282, 6350, 9035, 1820, 23652, 7301, 8925, 8701, 3533, 9462, 9123, 12788, 17729, 65552, 1261, 21476, 33770, 9380, 2569654, 33556, 53656, 44143, 32612, 10671, 261, 44570, 41922, 2552, 2417, 19319, 43969, 8921, 8993, 955, 32345, 966, 1920, 17318, 1510, 14180, 26005, 554, 16408, 42028, 112091, 13886, 13942, 1673, 54946 or 2419 protein include introducing into a subject a labeled anti-1722, 10280, 59917, 85553, 10653, 9235, 21668, 17794, 2210, 6169, 10102, 21061, 17662, 1468, 12282, 6350, 9035, 1820, 23652, 7301, 8925, 8701, 3533, 9462, 9123, 12788, 17729, 65552, 1261, 21476, 33770, 9380, 2569654, 33556, 53656, 44143, 32612, 10671, 261, 44570, 41922, 2552, 2417, 19319, 43969, 8921, 8993, 955, 32345, 966, 1920, 17318, 1510, 14180, 26005, 554, 16408, 42028, 112091, 13886, 13942, 1673, 54946 or 2419 antibody. For example, the antibody can be labeled with a radioactive marker whose presence and location in a subject can be detected by standard imaging techniques.

[0351] In another embodiment, the methods further involve obtaining a control biological sample from a control subject, contacting the control sample with a compound or agent capable of detecting 1722, 10280, 59917, 85553, 10653, 9235, 21668, 17794, 2210, 6169, 10102, 21061, 17662, 1468, 12282, 6350, 9035, 1820, 23652, 7301, 8925, 8701, 3533, 9462, 9123, 12788, 17729, 65552, 1261, 21476, 33770, 9380, 2569654, 33556, 53656, 44143, 32612, 10671, 261, 44570, 41922, 2552, 2417, 19319, 43969, 8921, 8993, 955, 32345, 966, 1920, 17318, 1510, 14180, 26005, 554, 16408, 42028, 112091, 13886, 13942, 1673, 54946 or 2419 protein, mRNA, or genomic DNA, such that the presence of 1722, 10280, 59917, 85553, 10653, 9235, 21668, 17794, 2210, 6169, 10102, 21061, 17662, 1468, 12282, 6350, 9035, 1820, 23652, 7301, 8925, 8701, 3533, 9462, 9123, 12788, 17729, 65552, 1261, 21476, 33770, 9380, 2569654, 33556, 53656, 44143, 32612, 10671, 261, 44570, 41922, 2552, 2417, 19319, 43969, 8921, 8993, 955, 32345, 966, 1920, 17318, 1510, 14180, 26005, 554, 16408, 42028, 112091, 13886, 13942, 1673, 54946 or 2419 protein, mRNA or genomic DNA is detected in the biological sample, and comparing the presence of 1722, 10280, 59917, 85553, 10653, 9235, 21668, 17794, 2210, 6169, 10102, 21061, 17662, 1468, 12282, 6350, 9035, 1820, 23652, 7301, 8925, 8701, 3533, 9462, 9123, 12788, 17729, 65552, 1261, 21476, 33770, 9380, 2569654, 33556, 53656, 44143, 32612, 10671, 261, 44570, 41922, 2552, 2417, 19319, 43969, 8921, 8993, 955, 32345, 966, 1920, 17318, 1510, 14180, 26005, 554, 16408, 42028, 112091, 13886, 13942, 1673, 54946 or 2419 protein, mRNA or genomic DNA in the control sample with the presence of 1722, 10280, 59917, 85553, 10653, 9235, 21668, 17794, 2210, 6169, 10102, 21061, 17662, 1468, 12282, 6350, 9035, 1820, 23652, 7301, 8925, 8701, 3533, 9462, 9123, 12788, 17729, 65552, 1261, 21476, 33770, 9380, 2569654, 33556, 53656, 44143, 32612, 10671, 261, 44570, 41922, 2552, 2417, 19319, 43969, 8921, 8993, 955, 32345, 966, 1920, 17318, 1510, 14180, 26005, 554, 16408, 42028, 112091, 13886, 13942, 1673, 54946 or 2419 protein, mRNA or genomic DNA in the test sample.

[0352] B. Prognostic Assays For Cardiovascular Disease

[0353] The present invention further pertains to methods for identifying subjects having or at risk of developing a cardiovascular disease associated with aberrant 1722, 10280, 59917, 85553, 10653, 9235, 21668, 17794, 2210, 6169, 10102, 21061, 17662, 1468, 12282, 6350, 9035, 1820, 23652, 7301, 8925, 8701, 3533, 9462, 9123, 12788, 17729, 65552, 1261, 21476, 33770, 9380, 2569654, 33556, 53656, 44143, 32612, 10671, 261, 44570, 41922, 2552, 2417, 19319, 43969, 8921, 8993, 955, 32345, 966, 1920, 17318, 1510, 14180, 26005, 554, 16408, 42028, 112091, 13886, 13942, 1673, 54946 or 2419 expression or activity.

[0354] As used herein, the term “aberrant” includes a 1722, 10280, 59917, 85553, 10653, 9235, 21668, 17794, 2210, 6169, 10102, 21061, 17662, 1468, 12282, 6350, 9035, 1820, 23652, 7301, 8925, 8701, 3533, 9462, 9123, 12788, 17729, 65552, 1261, 21476, 33770, 9380, 2569654, 33556, 53656, 44143, 32612, 10671, 261, 44570, 41922, 2552, 2417, 19319, 43969, 8921, 8993, 955, 32345, 966, 1920, 17318, 1510, 14180, 26005, 554, 16408, 42028, 112091, 13886, 13942, 1673, 54946 or 2419 expression or activity which deviates from the wild type 1722, 10280, 59917, 85553, 10653, 9235, 21668, 17794, 2210, 6169, 10102, 21061, 17662, 1468, 12282, 6350, 9035, 1820, 23652, 7301, 8925, 8701, 3533, 9462, 9123, 12788, 17729, 65552, 1261, 21476, 33770, 9380, 2569654, 33556, 53656, 44143, 32612, 10671, 261, 44570, 41922, 2552, 2417, 19319, 43969, 8921, 8993, 955, 32345, 966, 1920, 17318, 1510, 14180, 26005, 554, 16408, 42028, 112091, 13886, 13942, 1673, 54946 or 2419 expression or activity. Aberrant expression or activity includes increased or decreased expression or activity, as well as expression or activity which does not follow the wild type developmental pattern of expression or the subcellular pattern of expression. For example, aberrant 1722, 10280, 59917, 85553, 10653, 9235, 21668, 17794, 2210, 6169, 10102, 21061, 17662, 1468, 12282, 6350, 9035, 1820, 23652, 7301, 8925, 8701, 3533, 9462, 9123, 12788, 17729, 65552, 1261, 21476, 33770, 9380, 2569654, 33556, 53656, 44143, 32612, 10671, 261, 44570, 41922, 2552, 2417, 19319, 43969, 8921, 8993, 955, 32345, 966, 1920, 17318, 1510, 14180, 26005, 554, 16408, 42028, 112091, 13886, 13942, 1673, 54946 or 2419 expression or activity is intended to include the cases in which a mutation in the 1722, 10280, 59917, 85553, 10653, 9235, 21668, 17794, 2210, 6169, 10102, 21061, 17662, 1468, 12282, 6350, 9035, 1820, 23652, 7301, 8925, 8701, 3533, 9462, 9123, 12788, 17729, 65552, 1261, 21476, 33770, 9380, 2569654, 33556, 53656, 44143, 32612, 10671, 261, 44570, 41922, 2552, 2417, 19319, 43969, 8921, 8993, 955, 32345, 966, 1920, 17318, 1510, 14180, 26005, 554, 16408, 42028, 112091, 13886, 13942, 1673, 54946 or 2419 gene causes the 1722, 10280, 59917, 85553, 10653, 9235, 21668, 17794, 2210, 6169, 10102, 21061, 17662, 1468, 12282, 6350, 9035, 1820, 23652, 7301, 8925, 8701, 3533, 9462, 9123, 12788, 17729, 65552, 1261, 21476, 33770, 9380, 2569654, 33556, 53656, 44143, 32612, 10671, 261, 44570, 41922, 2552, 2417, 19319, 43969, 8921, 8993, 955, 32345, 966, 1920, 17318, 1510, 14180, 26005, 554, 16408, 42028, 112091, 13886, 13942, 1673, 54946 or 2419 gene to be under-expressed or over-expressed and situations in which such mutations result in a non-functional 1722, 10280, 59917, 85553, 10653, 9235, 21668, 17794, 2210, 6169, 10102, 21061, 17662, 1468, 12282, 6350, 9035, 1820, 23652, 7301, 8925, 8701, 3533, 9462, 9123, 12788, 17729, 65552, 1261, 21476, 33770, 9380, 2569654, 33556, 53656, 44143, 32612, 10671, 261, 44570, 41922, 2552, 2417, 19319, 43969, 8921, 8993, 955, 32345, 966, 1920, 17318, 1510, 14180, 26005, 554, 16408, 42028, 112091, 13886, 13942, 1673, 54946 or 2419 protein or a protein which does not function in a wild-type fashion, e.g., a protein which does not interact with a 1722, 10280, 59917, 85553, 10653, 9235, 21668, 17794, 2210, 6169, 10102, 21061, 17662, 1468, 12282, 6350, 9035, 1820, 23652, 7301, 8925, 8701, 3533, 9462, 9123, 12788, 17729, 65552, 1261, 21476, 33770, 9380, 2569654, 33556, 53656, 44143, 32612, 10671, 261, 44570, 41922, 2552, 2417, 19319, 43969, 8921, 8993, 955, 32345, 966, 1920, 17318, 1510, 14180, 26005, 554, 16408, 42028, 112091, 13886, 13942, 1673, 54946 or 2419 substrate, or one which interacts with a non-1722, 10280, 59917, 85553, 10653, 9235, 21668, 17794, 2210, 6169, 10102, 21061, 17662, 1468, 12282, 6350, 9035, 1820, 23652, 7301, 8925, 8701, 3533, 9462, 9123, 12788, 17729, 65552, 1261, 21476, 33770, 9380, 2569654, 33556, 53656, 44143, 32612, 10671, 261, 44570, 41922, 2552, 2417, 19319, 43969, 8921, 8993, 955, 32345, 966, 1920, 17318, 1510, 14180, 26005, 554, 16408, 42028, 112091, 13886, 13942, 1673, 54946 or 2419 substrate.

[0355] The assays described herein, such as the preceding diagnostic assays or the following assays, can be used to identify a subject having or at risk of developing a cardiovascular disease, e.g., including but not limited to, atherosclerosis, ischemia/reperfusion injury, hypertension, restenosis, arterial inflammation, and endothelial cell disorders. A biological sample may be obtained from a subject and tested for the presence or absence of a genetic alteration. For example, such genetic alterations can be detected by ascertaining the existence of at least one of 1) a deletion of one or more nucleotides from a 1722, 10280, 59917, 85553, 10653, 9235, 21668, 17794, 2210, 6169, 10102, 21061, 17662, 1468, 12282, 6350, 9035, 1820, 23652, 7301, 8925, 8701, 3533, 9462, 9123, 12788, 17729, 65552, 1261, 21476, 33770, 9380, 2569654, 33556, 53656, 44143, 32612, 10671, 261, 44570, 41922, 2552, 2417, 19319, 43969, 8921, 8993, 955, 32345, 966, 1920, 17318, 1510, 14180, 26005, 554, 16408, 42028, 112091, 13886, 13942, 1673, 54946 or 2419 gene, 2) an addition of one or more nucleotides to a 1722, 10280, 59917, 85553, 10653, 9235, 21668, 17794, 2210, 6169, 10102, 21061, 17662, 1468, 12282, 6350, 9035, 1820, 23652, 7301, 8925, 8701, 3533, 9462, 9123, 12788, 17729, 65552, 1261, 21476, 33770, 9380, 2569654, 33556, 53656, 44143, 32612, 10671, 261, 44570, 41922, 2552, 2417, 19319, 43969, 8921, 8993, 955, 32345, 966, 1920, 17318, 1510, 14180, 26005, 554, 16408, 42028, 112091, 13886, 13942, 1673, 54946 or 2419 gene, 3) a substitution of one or more nucleotides of a 1722, 10280, 59917, 85553, 10653, 9235, 21668, 17794, 2210, 6169, 10102, 21061, 17662, 1468, 12282, 6350, 9035, 1820, 23652, 7301, 8925, 8701, 3533, 9462, 9123, 12788, 17729, 65552, 1261, 21476, 33770, 9380, 2569654, 33556, 53656, 44143, 32612, 10671, 261, 44570, 41922, 2552, 2417, 19319, 43969, 8921, 8993, 955, 32345, 966, 1920, 17318, 1510, 14180, 26005, 554, 16408, 42028, 112091, 13886, 13942, 1673, 54946 or 2419 gene, 4) a chromosomal rearrangement of a 1722, 10280, 59917, 85553, 10653, 9235, 21668, 17794, 2210, 6169, 10102, 21061, 17662, 1468, 12282, 6350, 9035, 1820, 23652, 7301, 8925, 8701, 3533, 9462, 9123, 12788, 17729, 65552, 1261, 21476, 33770, 9380, 2569654, 33556, 53656, 44143, 32612, 10671, 261, 44570, 41922, 2552, 2417, 19319, 43969, 8921, 8993, 955, 32345, 966, 1920, 17318, 1510, 14180, 26005, 554, 16408, 42028, 112091, 13886, 13942, 1673, 54946 or 2419 gene, 5) an alteration in the level of a messenger RNA transcript of a 1722, 10280, 59917, 85553, 10653, 9235, 21668, 17794, 2210, 6169, 10102, 21061, 17662, 1468, 12282, 6350, 9035, 1820, 23652, 7301, 8925, 8701, 3533, 9462, 9123, 12788, 17729, 65552, 1261, 21476, 33770, 9380, 2569654, 33556, 53656, 44143, 32612, 10671, 261, 44570, 41922, 2552, 2417, 19319, 43969, 8921, 8993, 955, 32345, 966, 1920, 17318, 1510, 14180, 26005, 554, 16408, 42028, 112091, 13886, 13942, 1673, 54946 or 2419 gene, 6) aberrant modification of a 1722, 10280, 59917, 85553, 10653, 9235, 21668, 17794, 2210, 6169, 10102, 21061, 17662, 1468, 12282, 6350, 9035, 1820, 23652, 7301, 8925, 8701, 3533, 9462, 9123, 12788, 17729, 65552, 1261, 21476, 33770, 9380, 2569654, 33556, 53656, 44143, 32612, 10671, 261, 44570, 41922, 2552, 2417, 19319, 43969, 8921, 8993, 955, 32345, 966, 1920, 17318, 1510, 14180, 26005, 554, 16408, 42028, 112091, 13886, 13942, 1673, 54946 or 2419 gene, such as of the methylation pattern of the genomic DNA, 7) the presence of a non-wild type splicing pattern of a messenger RNA transcript of a 1722, 10280, 59917, 85553, 10653, 9235, 21668, 17794, 2210, 6169, 10102, 21061, 17662, 1468, 12282, 6350, 9035, 1820, 23652, 7301, 8925, 8701, 3533, 9462, 9123, 12788, 17729, 65552, 1261, 21476, 33770, 9380, 2569654, 33556, 53656, 44143, 32612, 10671, 261, 44570, 41922, 2552, 2417, 19319, 43969, 8921, 8993, 955, 32345, 966, 1920, 17318, 1510, 14180, 26005, 554, 16408, 42028, 112091, 13886, 13942, 1673, 54946 or 2419 gene, 8) a non-wild type level of a 1722, 10280, 59917, 85553, 10653, 9235, 21668, 17794, 2210, 6169, 10102, 21061, 17662, 1468, 12282, 6350, 9035, 1820, 23652, 7301, 8925, 8701, 3533, 9462, 9123, 12788, 17729, 65552, 1261, 21476, 33770, 9380, 2569654, 33556, 53656, 44143, 32612, 10671, 261, 44570, 41922, 2552, 2417, 19319, 43969, 8921, 8993, 955, 32345, 966, 1920, 17318, 1510, 14180, 26005, 554, 16408, 42028, 112091, 13886, 13942, 1673, 54946 or 2419-protein, 9) allelic loss of a 1722, 10280, 59917, 85553, 10653, 9235, 21668, 17794, 2210, 6169, 10102, 21061, 17662, 1468, 12282, 6350, 9035, 1820, 23652, 7301, 8925, 8701, 3533, 9462, 9123, 12788, 17729, 65552, 1261, 21476, 33770, 9380, 2569654, 33556, 53656, 44143, 32612, 10671, 261, 44570, 41922, 2552, 2417, 19319, 43969, 8921, 8993, 955, 32345, 966, 1920, 17318, 1510, 14180, 26005, 554, 16408, 42028, 112091, 13886, 13942, 1673, 54946 or 2419 gene, and 10) inappropriate post-translational modification of a 1722, 10280, 59917, 85553, 10653, 9235, 21668, 17794, 2210, 6169, 10102, 21061, 17662, 1468, 12282, 6350, 9035, 1820, 23652, 7301, 8925, 8701, 3533, 9462, 9123, 12788, 17729, 65552, 1261, 21476, 33770, 9380, 2569654, 33556, 53656, 44143, 32612, 10671, 261, 44570, 41922, 2552, 2417, 19319, 43969, 8921, 8993, 955, 32345, 966, 1920, 17318, 1510, 14180, 26005, 554, 16408, 42028, 112091, 13886, 13942, 1673, 54946 or 2419-protein.

[0356] As described herein, there are a large number of assays known in the art which can be used for detecting genetic alterations in a 1722, 10280, 59917, 85553, 10653, 9235, 21668, 17794, 2210, 6169, 10102, 21061, 17662, 1468, 12282, 6350, 9035, 1820, 23652, 7301, 8925, 8701, 3533, 9462, 9123, 12788, 17729, 65552, 1261, 21476, 33770, 9380, 2569654, 33556, 53656, 44143, 32612, 10671, 261, 44570, 41922, 2552, 2417, 19319, 43969, 8921, 8993, 955, 32345, 966, 1920, 17318, 1510, 14180, 26005, 554, 16408, 42028, 112091, 13886, 13942, 1673, 54946 or 2419 gene. For example, a genetic alteration in a 1722, 10280, 59917, 85553, 10653, 9235, 21668, 17794, 2210, 6169, 10102, 21061, 17662, 1468, 12282, 6350, 9035, 1820, 23652, 7301, 8925, 8701, 3533, 9462, 9123, 12788, 17729, 65552, 1261, 21476, 33770, 9380, 2569654, 33556, 53656, 44143, 32612, 10671, 261, 44570, 41922, 2552, 2417, 19319, 43969, 8921, 8993, 955, 32345, 966, 1920, 17318, 1510, 14180, 26005, 554, 16408, 42028, 112091, 13886, 13942, 1673, 54946 or 2419 gene may be detected using a probe/primer in a polymerase chain reaction (PCR) (see, e.g., U.S. Pat. Nos. 4,683,195 and 4,683,202), such as anchor PCR or RACE PCR, or, alternatively, in a ligation chain reaction (LCR) (see, e.g., Landegran et al. (1988) Science 241:1077-1080; and Nakazawa et al. (1994) Proc. Natl. Acad. Sci. USA 91:360-364), the latter of which can be particularly useful for detecting point mutations in a 1722, 10280, 59917, 85553, 10653, 9235, 21668, 17794, 2210, 6169, 10102, 21061, 17662, 1468, 12282, 6350, 9035, 1820, 23652, 7301, 8925, 8701, 3533, 9462, 9123, 12788, 17729, 65552, 1261, 21476, 33770, 9380, 2569654, 33556, 53656, 44143, 32612, 10671, 261, 44570, 41922, 2552, 2417, 19319, 43969, 8921, 8993, 955, 32345, 966, 1920, 17318, 1510, 14180, 26005, 554, 16408, 42028, 112091, 13886, 13942, 1673, 54946 or 2419 gene (see Abravaya et al. (1995) Nucleic Acids Res. 23:675-682). This method includes collecting a biological sample from a subject, isolating nucleic acid (e.g., genomic DNA, mRNA or both) from the sample, contacting the nucleic acid sample with one or more primers which specifically hybridize to a 1722, 10280, 59917, 85553, 10653, 9235, 21668, 17794, 2210, 6169, 10102, 21061, 17662, 1468, 12282, 6350, 9035, 1820, 23652, 7301, 8925, 8701, 3533, 9462, 9123, 12788, 17729, 65552, 1261, 21476, 33770, 9380, 2569654, 33556, 53656, 44143, 32612, 10671, 261, 44570, 41922, 2552, 2417, 19319, 43969, 8921, 8993, 955, 32345, 966, 1920, 17318, 1510, 14180, 26005, 554, 16408, 42028, 112091, 13886, 13942, 1673, 54946 or 2419 gene under conditions such that hybridization and amplification of the 1722, 10280, 59917, 85553, 10653, 9235, 21668, 17794, 2210, 6169, 10102, 21061, 17662, 1468, 12282, 6350, 9035, 1820, 23652, 7301, 8925, 8701, 3533, 9462, 9123, 12788, 17729, 65552, 1261, 21476, 33770, 9380, 2569654, 33556, 53656, 44143, 32612, 10671, 261, 44570, 41922, 2552, 2417, 19319, 43969, 8921, 8993, 955, 32345, 966, 1920, 17318, 1510, 14180, 26005, 554, 16408, 42028, 112091, 13886, 13942, 1673, 54946 or 2419 gene (if present) occurs, and detecting the presence or absence of an amplification product, or detecting the size of the amplification product and comparing the length to a control sample. It is anticipated that PCR and/or LCR may be desirable to use as a preliminary amplification step in conjunction with any of the techniques used for detecting mutations described herein.

[0357] Alternative amplification methods include: self sustained sequence replication (Guatelli, J. C. et al. (1990) Proc. Natl. Acad. Sci. USA 87:1874-1878), transcriptional amplification system (Kwoh, D. Y. et al. (1989) Proc. Natl. Acad. Sci. USA 86:1173-1177), Q-Beta Replicase (Lizardi, P. M. et al. (1988) Bio-Technology 6:1197), or any other nucleic acid amplification method, followed by the detection of the amplified molecules using techniques well known to those of skill in the art. These detection schemes are especially useful for the detection of nucleic acid molecules if such molecules are present in very low numbers.

[0358] In an alternative embodiment, mutations in a 1722, 10280, 59917, 85553, 10653, 9235, 21668, 17794, 2210, 6169, 10102, 21061, 17662, 1468, 12282, 6350, 9035, 1820, 23652, 7301, 8925, 8701, 3533, 9462, 9123, 12788, 17729, 65552, 1261, 21476, 33770, 9380, 2569654, 33556, 53656, 44143, 32612, 10671, 261, 44570, 41922, 2552, 2417, 19319, 43969, 8921, 8993, 955, 32345, 966, 1920, 17318, 1510, 14180, 26005, 554, 16408, 42028, 112091, 13886, 13942, 1673, 54946 or 2419 gene from a biological sample can be identified by alterations in restriction enzyme cleavage patterns. For example, sample and control DNA is isolated, amplified (optionally), digested with one or more restriction endonucleases, and fragment length sizes are determined by gel electrophoresis and compared. Differences in fragment length sizes between sample and control DNA indicates mutations in the sample DNA. Moreover, the use of sequence specific ribozymes (see, for example, U.S. Pat. No. 5,498,531) can be used to score for the presence of specific mutations by development or loss of a ribozyme cleavage site.

[0359] In other embodiments, genetic mutations in 1722, 10280, 59917, 85553, 10653, 9235, 21668, 17794, 2210, 6169, 10102, 21061, 17662, 1468, 12282, 6350, 9035, 1820, 23652, 7301, 8925, 8701, 3533, 9462, 9123, 12788, 17729, 65552, 1261, 21476, 33770, 9380, 2569654, 33556, 53656, 44143, 32612, 10671, 261, 44570, 41922, 2552, 2417, 19319, 43969, 8921, 8993, 955, 32345, 966, 1920, 17318, 1510, 14180, 26005, 554, 16408, 42028, 112091, 13886, 13942, 1673, 54946 or 2419 can be identified by hybridizing biological sample derived and control nucleic acids, e.g., DNA or RNA, to high density arrays containing hundreds or thousands of oligonucleotide probes (Cronin, M. T. et al. (1996) Human Mutation 7:244-255; Kozal, M. J. et al. (1996) Nature Medicine 2:753-759). For example, genetic mutations in 1722, 10280, 59917, 85553, 10653, 9235, 21668, 17794, 2210, 6169, 10102, 21061, 17662, 1468, 12282, 6350, 9035, 1820, 23652, 7301, 8925, 8701, 3533, 9462, 9123, 12788, 17729, 65552, 1261, 21476, 33770, 9380, 2569654, 33556, 53656, 44143, 32612, 10671, 261, 44570, 41922, 2552, 2417, 19319, 43969, 8921, 8993, 955, 32345, 966, 1920, 17318, 1510, 14180, 26005, 554, 16408, 42028, 112091, 13886, 13942, 1673, 54946 or 2419 can be identified in two dimensional arrays containing light-generated DNA probes as described in Cronin, M. T. et al. (1996) supra. Briefly, a first hybridization array of probes can be used to scan through long stretches of DNA in a sample and control to identify base changes between the sequences by making linear arrays of sequential, overlapping probes. This step allows for the identification of point mutations. This step is followed by a second hybridization array that allows for the characterization of specific mutations by using smaller, specialized probe arrays complementary to all variants or mutations detected. Each mutation array is composed of parallel probe sets, one complementary to the wild-type gene and the other complementary to the mutant gene.

[0360] In yet another embodiment, any of a variety of sequencing reactions known in the art can be used to directly sequence the 1722, 10280, 59917, 85553, 10653, 9235, 21668, 17794, 2210, 6169, 10102, 21061, 17662, 1468, 12282, 6350, 9035, 1820, 23652, 7301, 8925, 8701, 3533, 9462, 9123, 12788, 17729, 65552, 1261, 21476, 33770, 9380, 2569654, 33556, 53656, 44143, 32612, 10671, 261, 44570, 41922, 2552, 2417, 19319, 43969, 8921, 8993, 955, 32345, 966, 1920, 17318, 1510, 14180, 26005, 554, 16408, 42028, 112091, 13886, 13942, 1673, 54946 or 2419 gene in a biological sample and detect mutations by comparing the sequence of the 1722, 10280, 59917, 85553, 10653, 9235, 21668, 17794, 2210, 6169, 10102, 21061, 17662, 1468, 12282, 6350, 9035, 1820, 23652, 7301, 8925, 8701, 3533, 9462, 9123, 12788, 17729, 65552, 1261, 21476, 33770, 9380, 2569654, 33556, 53656, 44143, 32612, 10671, 261, 44570, 41922, 2552, 2417, 19319, 43969, 8921, 8993, 955, 32345, 966, 1920, 17318, 1510, 14180, 26005, 554, 16408, 42028, 112091, 13886, 13942, 1673, 54946 or 2419 in the biological sample with the corresponding wild-type (control) sequence. Examples of sequencing reactions include those based on techniques developed by Maxam and Gilbert (1977) Proc. Natl. Acad. Sci. USA 74:560) or Sanger (1977) Proc. Natl. Acad. Sci. USA 74:5463). It is also contemplated that any of a variety of automated sequencing procedures can be utilized when performing the diagnostic assays (Naeve, C. W. (1995) Biotechniques 19:448-53), including sequencing by mass spectrometry (see, e.g., PCT International Publication No. WO 94/16101; Cohen et al. (1996) Adv. Chromatogr. 36:127-162; and Griffin et al. (1993) Appl. Biochem. Biotechnol. 38:147-159).

[0361] Other methods for detecting mutations in the 1722, 10280, 59917, 85553, 10653, 9235, 21668, 17794, 2210, 6169, 10102, 21061, 17662, 1468, 12282, 6350, 9035, 1820, 23652, 7301, 8925, 8701, 3533, 9462, 9123, 12788, 17729, 65552, 1261, 21476, 33770, 9380, 2569654, 33556, 53656, 44143, 32612, 10671, 261, 44570, 41922, 2552, 2417, 19319, 43969, 8921, 8993, 955, 32345, 966, 1920, 17318, 1510, 14180, 26005, 554, 16408, 42028, 112091, 13886, 13942, 1673, 54946 or 2419 gene include methods in which protection from cleavage agents is used to detect mismatched bases in RNA/RNA or RNA/DNA heteroduplexes (Myers et al. (1985) Science 230:1242). In general, the art technique of “mismatch cleavage” starts by providing heteroduplexes formed by hybridizing (labeled) RNA or DNA containing the wild-type 1722, 10280, 59917, 85553, 10653, 9235, 21668, 17794, 2210, 6169, 10102, 21061, 17662, 1468, 12282, 6350, 9035, 1820, 23652, 7301, 8925, 8701, 3533, 9462, 9123, 12788, 17729, 65552, 1261, 21476, 33770, 9380, 2569654, 33556, 53656, 44143, 32612, 10671, 261, 44570, 41922, 2552, 2417, 19319, 43969, 8921, 8993, 955, 32345, 966, 1920, 17318, 1510, 14180, 26005, 554, 16408, 42028, 112091, 13886, 13942, 1673, 54946 or 2419 sequence with potentially mutant RNA or DNA obtained from a tissue sample. The double-stranded duplexes are treated with an agent which cleaves single-stranded regions of the duplex such as which will exist due to basepair mismatches between the control and sample strands. For instance, RNA/DNA duplexes can be treated with RNase and DNA/DNA hybrids treated with S1 nuclease to enzymatically digest the mismatched regions. In other embodiments, either DNA/DNA or RNA/DNA duplexes can be treated with hydroxylamine or osmium tetroxide and with piperidine in order to digest mismatched regions. After digestion of the mismatched regions, the resulting material is then separated by size on denaturing polyacrylamide gels to determine the site of mutation. See, for example, Cotton et al. (1988) Proc. Natl. Acad Sci USA 85:4397 and Saleeba et al. (1992) Methods Enzymol. 217:286-295. In a preferred embodiment, the control DNA or RNA can be labeled for detection.

[0362] In still another embodiment, the mismatch cleavage reaction employs one or more proteins that recognize mismatched base pairs in double-stranded DNA (so called “DNA mismatch repair” enzymes) in defined systems for detecting and mapping point mutations in 1722, 10280, 59917, 85553, 10653, 9235, 21668, 17794, 2210, 6169, 10102, 21061, 17662, 1468, 12282, 6350, 9035, 1820, 23652, 7301, 8925, 8701, 3533, 9462, 9123, 12788, 17729, 65552, 1261, 21476, 33770, 9380, 2569654, 33556, 53656, 44143, 32612, 10671, 261, 44570, 41922, 2552, 2417, 19319, 43969, 8921, 8993, 955, 32345, 966, 1920, 17318, 1510, 14180, 26005, 554, 16408, 42028, 112091, 13886, 13942, 1673, 54946 or 2419 cDNAs obtained from samples of cells. For example, the mutY enzyme of E. coli cleaves A at G/A mismatches and the thymidine DNA glycosylase from HeLa cells cleaves T at G/T mismatches (Hsu et al. (1994) Carcinogenesis 15:1657-1662). According to an exemplary embodiment, a probe based on a 1722, 10280, 59917, 85553, 10653, 9235, 21668, 17794, 2210, 6169, 10102, 21061, 17662, 1468, 12282, 6350, 9035, 1820, 23652, 7301, 8925, 8701, 3533, 9462, 9123, 12788, 17729, 65552, 1261, 21476, 33770, 9380, 2569654, 33556, 53656, 44143, 32612, 10671, 261, 44570, 41922, 2552, 2417, 19319, 43969, 8921, 8993, 955, 32345, 966, 1920, 17318, 1510, 14180, 26005, 554, 16408, 42028, 112091, 13886, 13942, 1673, 54946 or 2419 sequence, e.g., a wild-type 1722, 10280, 59917, 85553, 10653, 9235, 21668, 17794, 2210, 6169, 10102, 21061, 17662, 1468, 12282, 6350, 9035, 1820, 23652, 7301, 8925, 8701, 3533, 9462, 9123, 12788, 17729, 65552, 1261, 21476, 33770, 9380, 2569654, 33556, 53656, 44143, 32612, 10671, 261, 44570, 41922, 2552, 2417, 19319, 43969, 8921, 8993, 955, 32345, 966, 1920, 17318, 1510, 14180, 26005, 554, 16408, 42028, 112091, 13886, 13942, 1673, 54946 or 2419 sequence, is hybridized to a cDNA or other DNA product from a test cell(s). The duplex is treated with a DNA mismatch repair enzyme, and the cleavage products, if any, can be detected from electrophoresis protocols or the like. See, for example, U.S. Pat. No. 5,459,039.

[0363] In other embodiments, alterations in electrophoretic mobility will be used to identify mutations in 1722, 10280, 59917, 85553, 10653, 9235, 21668, 17794, 2210, 6169, 10102, 21061, 17662, 1468, 12282, 6350, 9035, 1820, 23652, 7301, 8925, 8701, 3533, 9462, 9123, 12788, 17729, 65552, 1261, 21476, 33770, 9380, 2569654, 33556, 53656, 44143, 32612, 10671, 261, 44570, 41922, 2552, 2417, 19319, 43969, 8921, 8993, 955, 32345, 966, 1920, 17318, 1510, 14180, 26005, 554, 16408, 42028, 112091, 13886, 13942, 1673, 54946 or 2419 genes. For example, single strand conformation polymorphism (SSCP) may be used to detect differences in electrophoretic mobility between mutant and wild type nucleic acids (Orita et al. (1989) Proc Natl. Acad. Sci USA: 86:2766; see also Cotton (1993) Mutat. Res. 285:125-144 and Hayashi (1992) Genet. Anal. Tech. Appl. 9:73-79). Single-stranded DNA fragments of sample and control 1722, 10280, 59917, 85553, 10653, 9235, 21668, 17794, 2210, 6169, 10102, 21061, 17662, 1468, 12282, 6350, 9035, 1820, 23652, 7301, 8925, 8701, 3533, 9462, 9123, 12788, 17729, 65552, 1261, 21476, 33770, 9380, 2569654, 33556, 53656, 44143, 32612, 10671, 261, 44570, 41922, 2552, 2417, 19319, 43969, 8921, 8993, 955, 32345, 966, 1920, 17318, 1510, 14180, 26005, 554, 16408, 42028, 112091, 13886, 13942, 1673, 54946 or 2419 nucleic acids will be denatured and allowed to renature. The secondary structure of single-stranded nucleic acids varies according to sequence, the resulting alteration in electrophoretic mobility enables the detection of even a single base change. The DNA fragments may be labeled or detected with labeled probes. The sensitivity of the assay may be enhanced by using RNA (rather than DNA), in which the secondary structure is more sensitive to a change in sequence. In a preferred embodiment, the subject method utilizes heteroduplex analysis to separate double stranded heteroduplex molecules on the basis of changes in electrophoretic mobility (Keen et al. (1991) Trends Genet 7:5).

[0364] In yet another embodiment the movement of mutant or wild-type fragments in polyacrylamide gels containing a gradient of denaturant is assayed using denaturing gradient gel electrophoresis (DGGE) (Myers et al. (1985) Nature 313:495). When DGGE is used as the method of analysis, DNA will be modified to ensure that it does not completely denature, for example by adding a GC clamp of approximately 40 bp of high-melting GC-rich DNA by PCR. In a further embodiment, a temperature gradient is used in place of a denaturing gradient to identify differences in the mobility of control and sample DNA (Rosenbaum and Reissner (1987) Biophys Chem 265:12753).

[0365] Examples of other techniques for detecting point mutations include, but are not limited to, selective oligonucleotide hybridization, selective amplification, or selective primer extension. For example, oligonucleotide primers may be prepared in which the known mutation is placed centrally and then hybridized to target DNA under conditions which permit hybridization only if a perfect match is found (Saiki et al. (1986) Nature 324:163); Saiki et al. (1989) Proc. Natl. Acad. Sci USA 86:6230). Such allele specific oligonucleotides are hybridized to PCR amplified target DNA or a number of different mutations when the oligonucleotides are attached to the hybridizing membrane and hybridized with labeled target DNA.

[0366] Alternatively, allele specific amplification technology which depends on selective PCR amplification may be used in conjunction with the instant invention. Oligonucleotides used as primers for specific amplification may carry the mutation of interest in the center of the molecule (so that amplification depends on differential hybridization) (Gibbs et al. (1989) Nucleic Acids Res. 17:2437-2448) or at the extreme 3′ end of one primer where, under appropriate conditions, mismatch can prevent, or reduce polymerase extension (Prossner (1993) Tibtech 11:238). In addition it may be desirable to introduce a novel restriction site in the region of the mutation to create cleavage-based detection (Gasparini et al. (1992) Mol. Cell Probes 6:1). It is anticipated that in certain embodiments amplification may also be performed using Taq ligase for amplification (Barany (1991) Proc. Natl. Acad. Sci USA 88:189). In such cases, ligation will occur only if there is a perfect match at the 3′ end of the 5′ sequence making it possible to detect the presence of a known mutation at a specific site by looking for the presence or absence of amplification.

[0367] Furthermore, the prognostic assays described herein can be used to determine whether a subject can be administered a 1722, 10280, 59917, 85553, 10653, 9235, 21668, 17794, 2210, 6169, 10102, 21061, 17662, 1468, 12282, 6350, 9035, 1820, 23652, 7301, 8925, 8701, 3533, 9462, 9123, 12788, 17729, 65552, 1261, 21476, 33770, 9380, 2569654, 33556, 53656, 44143, 32612, 10671, 261, 44570, 41922, 2552, 2417, 19319, 43969, 8921, 8993, 955, 32345, 966, 1920, 17318, 1510, 14180, 26005, 554, 16408, 42028, 112091, 13886, 13942, 1673, 54946 or 2419 modulator (e.g., an agonist, antagonist, peptidomimetic, protein, peptide, nucleic acid, or small molecule) to effectively treat a cardiovascular disease, e.g., atherosclerosis.

[0368] C. Monitoring of Effects During Clinical Trials

[0369] The present invention further provides methods for determining the effectiveness of a 1722, 10280, 59917, 85553, 10653, 9235, 21668, 17794, 2210, 6169, 10102, 21061, 17662, 1468, 12282, 6350, 9035, 1820, 23652, 7301, 8925, 8701, 3533, 9462, 9123, 12788, 17729, 65552, 1261, 21476, 33770, 9380, 2569654, 33556, 53656, 44143, 32612, 10671, 261, 44570, 41922, 2552, 2417, 19319, 43969, 8921, 8993, 955, 32345, 966, 1920, 17318, 1510, 14180, 26005, 554, 16408, 42028, 112091, 13886, 13942, 1673, 54946 or 2419 modulator (e.g., a 1722, 10280, 59917, 85553, 10653, 9235, 21668, 17794, 2210, 6169, 10102, 21061, 17662, 1468, 12282, 6350, 9035, 1820, 23652, 7301, 8925, 8701, 3533, 9462, 9123, 12788, 17729, 65552, 1261, 21476, 33770, 9380, 2569654, 33556, 53656, 44143, 32612, 10671, 261, 44570, 41922, 2552, 2417, 19319, 43969, 8921, 8993, 955, 32345, 966, 1920, 17318, 1510, 14180, 26005, 554, 16408, 42028, 112091, 13886, 13942, 1673, 54946 or 2419 modulator identified herein) in treating a cardiovascular disease, e.g., atherosclerosis and/or thrombosis, in a subject. For example, the effectiveness of a 1722, 10280, 59917, 85553, 10653, 9235, 21668, 17794, 2210, 6169, 10102, 21061, 17662, 1468, 12282, 6350, 9035, 1820, 23652, 7301, 8925, 8701, 3533, 9462, 9123, 12788, 17729, 65552, 1261, 21476, 33770, 9380, 2569654, 33556, 53656, 44143, 32612, 10671, 261, 44570, 41922, 2552, 2417, 19319, 43969, 8921, 8993, 955, 32345, 966, 1920, 17318, 1510, 14180, 26005, 554, 16408, 42028, 112091, 13886, 13942, 1673, 54946 or 2419 modulator in increasing 1722, 10280, 59917, 85553, 10653, 9235, 21668, 17794, 2210, 6169, 10102, 21061, 17662, 1468, 12282, 6350, 9035, 1820, 23652, 7301, 8925, 8701, 3533, 9462, 9123, 12788, 17729, 65552, 1261, 21476, 33770, 9380, 2569654, 33556, 53656, 44143, 32612, 10671, 261, 44570, 41922, 2552, 2417, 19319, 43969, 8921, 8993, 955, 32345, 966, 1920, 17318, 1510, 14180, 26005, 554, 16408, 42028, 112091, 13886, 13942, 1673, 54946 or 2419 gene expression, protein levels, or in upregulating 1722, 10280, 59917, 85553, 10653, 9235, 21668, 17794, 2210, 6169, 10102, 21061, 17662, 1468, 12282, 6350, 9035, 1820, 23652, 7301, 8925, 8701, 3533, 9462, 9123, 12788, 17729, 65552, 1261, 21476, 33770, 9380, 2569654, 33556, 53656, 44143, 32612, 10671, 261, 44570, 41922, 2552, 2417, 19319, 43969, 8921, 8993, 955, 32345, 966, 1920, 17318, 1510, 14180, 26005, 554, 16408, 42028, 112091, 13886, 13942, 1673, 54946 or 2419 activity, can be monitored in clinical trials of subjects exhibiting decreased 1722, 10280, 59917, 85553, 10653, 9235, 21668, 17794, 2210, 6169, 10102, 21061, 17662, 1468, 12282, 6350, 9035, 1820, 23652, 7301, 8925, 8701, 3533, 9462, 9123, 12788, 17729, 65552, 1261, 21476, 33770, 9380, 2569654, 33556, 53656, 44143, 32612, 10671, 261, 44570, 41922, 2552, 2417, 19319, 43969, 8921, 8993, 955, 32345, 966, 1920, 17318, 1510, 14180, 26005, 554, 16408, 42028, 112091, 13886, 13942, 1673, 54946 or 2419 gene expression, protein levels, or downregulated 1722, 10280, 59917, 85553, 10653, 9235, 21668, 17794, 2210, 6169, 10102, 21061, 17662, 1468, 12282, 6350, 9035, 1820, 23652, 7301, 8925, 8701, 3533, 9462, 9123, 12788, 17729, 65552, 1261, 21476, 33770, 9380, 2569654, 33556, 53656, 44143, 32612, 10671, 261, 44570, 41922, 2552, 2417, 19319, 43969, 8921, 8993, 955, 32345, 966, 1920, 17318, 1510, 14180, 26005, 554, 16408, 42028, 112091, 13886, 13942, 1673, 54946 or 2419 activity. Alternatively, the effectiveness of a 1722, 10280, 59917, 85553, 10653, 9235, 21668, 17794, 2210, 6169, 10102, 21061, 17662, 1468, 12282, 6350, 9035, 1820, 23652, 7301, 8925, 8701, 3533, 9462, 9123, 12788, 17729, 65552, 1261, 21476, 33770, 9380, 2569654, 33556, 53656, 44143, 32612, 10671, 261, 44570, 41922, 2552, 2417, 19319, 43969, 8921, 8993, 955, 32345, 966, 1920, 17318, 1510, 14180, 26005, 554, 16408, 42028, 112091, 13886, 13942, 1673, 54946 or 2419 modulator in decreasing 1722, 10280, 59917, 85553, 10653, 9235, 21668, 17794, 2210, 6169, 10102, 21061, 17662, 1468, 12282, 6350, 9035, 1820, 23652, 7301, 8925, 8701, 3533, 9462, 9123, 12788, 17729, 65552, 1261, 21476, 33770, 9380, 2569654, 33556, 53656, 44143, 32612, 10671, 261, 44570, 41922, 2552, 2417, 19319, 43969, 8921, 8993, 955, 32345, 966, 1920, 17318, 1510, 14180, 26005, 554, 16408, 42028, 112091, 13886, 13942, 1673, 54946 or 2419 gene expression, protein levels, or in downregulating 1722, 10280, 59917, 85553, 10653, 9235, 21668, 17794, 2210, 6169, 10102, 21061, 17662, 1468, 12282, 6350, 9035, 1820, 23652, 7301, 8925, 8701, 3533, 9462, 9123, 12788, 17729, 65552, 1261, 21476, 33770, 9380, 2569654, 33556, 53656, 44143, 32612, 10671, 261, 44570, 41922, 2552, 2417, 19319, 43969, 8921, 8993, 955, 32345, 966, 1920, 17318, 1510, 14180, 26005, 554, 16408, 42028, 112091, 13886, 13942, 1673, 54946 or 2419 activity, can be monitored in clinical trials of subjects exhibiting increased 1722, 10280, 59917, 85553, 10653, 9235, 21668, 17794, 2210, 6169, 10102, 21061, 17662, 1468, 12282, 6350, 9035, 1820, 23652, 7301, 8925, 8701, 3533, 9462, 9123, 12788, 17729, 65552, 1261, 21476, 33770, 9380, 2569654, 33556, 53656, 44143, 32612, 10671, 261, 44570, 41922, 2552, 2417, 19319, 43969, 8921, 8993, 955, 32345, 966, 1920, 17318, 1510, 14180, 26005, 554, 16408, 42028, 112091, 13886, 13942, 1673, 54946 or 2419 gene expression, protein levels, or 1722, 10280, 59917, 85553, 10653, 9235, 21668, 17794, 2210, 6169, 10102, 21061, 17662, 1468, 12282, 6350, 9035, 1820, 23652, 7301, 8925, 8701, 3533, 9462, 9123, 12788, 17729, 65552, 1261, 21476, 33770, 9380, 2569654, 33556, 53656, 44143, 32612, 10671, 261, 44570, 41922, 2552, 2417, 19319, 43969, 8921, 8993, 955, 32345, 966, 1920, 17318, 1510, 14180, 26005, 554, 16408, 42028, 112091, 13886, 13942, 1673, 54946 or 2419 activity. In such clinical trials, the expression or activity of a 1722, 10280, 59917, 85553, 10653, 9235, 21668, 17794, 2210, 6169, 10102, 21061, 17662, 1468, 12282, 6350, 9035, 1820, 23652, 7301, 8925, 8701, 3533, 9462, 9123, 12788, 17729, 65552, 1261, 21476, 33770, 9380, 2569654, 33556, 53656, 44143, 32612, 10671, 261, 44570, 41922, 2552, 2417, 19319, 43969, 8921, 8993, 955, 32345, 966, 1920, 17318, 1510, 14180, 26005, 554, 16408, 42028, 112091, 13886, 13942, 1673, 54946 or 2419 gene, and preferably, other genes that have been implicated in, for example, atherosclerosis and/or thrombosis can be used as a “read out” or marker of the phenotype of a particular cell, e.g., a vascular endothelial cell.

[0370] For example, and not by way of limitation, genes, including 1722, 10280, 59917, 85553, 10653, 9235, 21668, 17794, 2210, 6169, 10102, 21061, 17662, 1468, 12282, 6350, 9035, 1820, 23652, 7301, 8925, 8701, 3533, 9462, 9123, 12788, 17729, 65552, 1261, 21476, 33770, 9380, 2569654, 33556, 53656, 44143, 32612, 10671, 261, 44570, 41922, 2552, 2417, 19319, 43969, 8921, 8993, 955, 32345, 966, 1920, 17318, 1510, 14180, 26005, 554, 16408, 42028, 112091, 13886, 13942, 1673, 54946 or 2419, that are modulated in cells by treatment with an agent which modulates 1722, 10280, 59917, 85553, 10653, 9235, 21668, 17794, 2210, 6169, 10102, 21061, 17662, 1468, 12282, 6350, 9035, 1820, 23652, 7301, 8925, 8701, 3533, 9462, 9123, 12788, 17729, 65552, 1261, 21476, 33770, 9380, 2569654, 33556, 53656, 44143, 32612, 10671, 261, 44570, 41922, 2552, 2417, 19319, 43969, 8921, 8993, 955, 32345, 966, 1920, 17318, 1510, 14180, 26005, 554, 16408, 42028, 112091, 13886, 13942, 1673, 54946 or 2419 activity (e.g., identified in a screening assay as described herein) can be identified. Thus, to study the effect of agents which modulate 1722, 10280, 59917, 85553, 10653, 9235, 21668, 17794, 2210, 6169, 10102, 21061, 17662, 1468, 12282, 6350, 9035, 1820, 23652, 7301, 8925, 8701, 3533, 9462, 9123, 12788, 17729, 65552, 1261, 21476, 33770, 9380, 2569654, 33556, 53656, 44143, 32612, 10671, 261, 44570, 41922, 2552, 2417, 19319, 43969, 8921, 8993, 955, 32345, 966, 1920, 17318, 1510, 14180, 26005, 554, 16408, 42028, 112091, 13886, 13942, 1673, 54946 or 2419 activity on subjects suffering from a cardiovascular disease in, for example, a clinical trial, cells can be isolated and RNA prepared and analyzed for the levels of expression of 1722, 10280, 59917, 85553, 10653, 9235, 21668, 17794, 2210, 6169, 10102, 21061, 17662, 1468, 12282, 6350, 9035, 1820, 23652, 7301, 8925, 8701, 3533, 9462, 9123, 12788, 17729, 65552, 1261, 21476, 33770, 9380, 2569654, 33556, 53656, 44143, 32612, 10671, 261, 44570, 41922, 2552, 2417, 19319, 43969, 8921, 8993, 955, 32345, 966, 1920, 17318, 1510, 14180, 26005, 554, 16408, 42028, 112091, 13886, 13942, 1673, 54946 or 2419 and other genes implicated in the cardiovascular disease. The levels of gene expression (e.g., a gene expression pattern) can be quantified by Northern blot analysis or RT-PCR, as described herein, or alternatively by measuring the amount of protein produced, by one of the methods described herein, or by measuring the levels of activity of 1722, 10280, 59917, 85553, 10653, 9235, 21668, 17794, 2210, 6169, 10102, 21061, 17662, 1468, 12282, 6350, 9035, 1820, 23652, 7301, 8925, 8701, 3533, 9462, 9123, 12788, 17729, 65552, 1261, 21476, 33770, 9380, 2569654, 33556, 53656, 44143, 32612, 10671, 261, 44570, 41922, 2552, 2417, 19319, 43969, 8921, 8993, 955, 32345, 966, 1920, 17318, 1510, 14180, 26005, 554, 16408, 42028, 112091, 13886, 13942, 1673, 54946 or 2419 or other genes. In this way, the gene expression pattern can serve as a marker, indicative of the physiological response of the cells to the agent which modulates 1722, 10280, 59917, 85553, 10653, 9235, 21668, 17794, 2210, 6169, 10102, 21061, 17662, 1468, 12282, 6350, 9035, 1820, 23652, 7301, 8925, 8701, 3533, 9462, 9123, 12788, 17729, 65552, 1261, 21476, 33770, 9380, 2569654, 33556, 53656, 44143, 32612, 10671, 261, 44570, 41922, 2552, 2417, 19319, 43969, 8921, 8993, 955, 32345, 966, 1920, 17318, 1510, 14180, 26005, 554, 16408, 42028, 112091, 13886, 13942, 1673, 54946 or 2419 activity. This response state may be determined before, and at various points during treatment of the individual with the agent which modulates 1722, 10280, 59917, 85553, 10653, 9235, 21668, 17794, 2210, 6169, 10102, 21061, 17662, 1468, 12282, 6350, 9035, 1820, 23652, 7301, 8925, 8701, 3533, 9462, 9123, 12788, 17729, 65552, 1261, 21476, 33770, 9380, 2569654, 33556, 53656, 44143, 32612, 10671, 261, 44570, 41922, 2552, 2417, 19319, 43969, 8921, 8993, 955, 32345, 966, 1920, 17318, 1510, 14180, 26005, 554, 16408, 42028, 112091, 13886, 13942, 1673, 54946 or 2419 activity.

[0371] In a preferred embodiment, the present invention provides a method for monitoring the effectiveness of treatment of a subject with an agent which modulates 1722, 10280, 59917, 85553, 10653, 9235, 21668, 17794, 2210, 6169, 10102, 21061, 17662, 1468, 12282, 6350, 9035, 1820, 23652, 7301, 8925, 8701, 3533, 9462, 9123, 12788, 17729, 65552, 1261, 21476, 33770, 9380, 2569654, 33556, 53656, 44143, 32612, 10671, 261, 44570, 41922, 2552, 2417, 19319, 43969, 8921, 8993, 955, 32345, 966, 1920, 17318, 1510, 14180, 26005, 554, 16408, 42028, 112091, 13886, 13942, 1673, 54946 or 2419 activity (e.g., an agonist, antagonist, peptidomimetic, protein, peptide, nucleic acid, or small molecule identified by the screening assays described herein) including the steps of (i) obtaining a pre-administration sample from a subject prior to administration of the agent; (ii) detecting the level of expression of a 1722, 10280, 59917, 85553, 10653, 9235, 21668, 17794, 2210, 6169, 10102, 21061, 17662, 1468, 12282, 6350, 9035, 1820, 23652, 7301, 8925, 8701, 3533, 9462, 9123, 12788, 17729, 65552, 1261, 21476, 33770, 9380, 2569654, 33556, 53656, 44143, 32612, 10671, 261, 44570, 41922, 2552, 2417, 19319, 43969, 8921, 8993, 955, 32345, 966, 1920, 17318, 1510, 14180, 26005, 554, 16408, 42028, 112091, 13886, 13942, 1673, 54946 or 2419 protein, mRNA, or genomic DNA in the pre-administration sample; (iii) obtaining one or more post-administration samples from the subject; (iv) detecting the level of expression or activity of the 1722, 10280, 59917, 85553, 10653, 9235, 21668, 17794, 2210, 6169, 10102, 21061, 17662, 1468, 12282, 6350, 9035, 1820, 23652, 7301, 8925, 8701, 3533, 9462, 9123, 12788, 17729, 65552, 1261, 21476, 33770, 9380, 2569654, 33556, 53656, 44143, 32612, 10671, 261, 44570, 41922, 2552, 2417, 19319, 43969, 8921, 8993, 955, 32345, 966, 1920, 17318, 1510, 14180, 26005, 554, 16408, 42028, 112091, 13886, 13942, 1673, 54946 or 2419 protein, mRNA, or genomic DNA in the post-administration samples; (v) comparing the level of expression or activity of the 1722, 10280, 59917, 85553, 10653, 9235, 21668, 17794, 2210, 6169, 10102, 21061, 17662, 1468, 12282, 6350, 9035, 1820, 23652, 7301, 8925, 8701, 3533, 9462, 9123, 12788, 17729, 65552, 1261, 21476, 33770, 9380, 2569654, 33556, 53656, 44143, 32612, 10671, 261, 44570, 41922, 2552, 2417, 19319, 43969, 8921, 8993, 955, 32345, 966, 1920, 17318, 1510, 14180, 26005, 554, 16408, 42028, 112091, 13886, 13942, 1673, 54946 or 2419 protein, mRNA, or genomic DNA in the pre-administration sample with the 1722, 10280, 59917, 85553, 10653, 9235, 21668, 17794, 2210, 6169, 10102, 21061, 17662, 1468, 12282, 6350, 9035, 1820, 23652, 7301, 8925, 8701, 3533, 9462, 9123, 12788, 17729, 65552, 1261, 21476, 33770, 9380, 2569654, 33556, 53656, 44143, 32612, 10671, 261, 44570, 41922, 2552, 2417, 19319, 43969, 8921, 8993, 955, 32345, 966, 1920, 17318, 1510, 14180, 26005, 554, 16408, 42028, 112091, 13886, 13942, 1673, 54946 or 2419 protein, mRNA, or genomic DNA in the post administration sample or samples; and (vi) altering the administration of the agent to the subject accordingly. For example, increased administration of the agent may be desirable to increase the expression or activity of 1722, 10280, 59917, 85553, 10653, 9235, 21668, 17794, 2210, 6169, 10102, 21061, 17662, 1468, 12282, 6350, 9035, 1820, 23652, 7301, 8925, 8701, 3533, 9462, 9123, 12788, 17729, 65552, 1261, 21476, 33770, 9380, 2569654, 33556, 53656, 44143, 32612, 10671, 261, 44570, 41922, 2552, 2417, 19319, 43969, 8921, 8993, 955, 32345, 966, 1920, 17318, 1510, 14180, 26005, 554, 16408, 42028, 112091, 13886, 13942, 1673, 54946 or 2419 to higher levels than detected, i.e., to increase the effectiveness of the agent. Alternatively, decreased administration of the agent may be desirable to decrease expression or activity of 1722, 10280, 59917, 85553, 10653, 9235, 21668, 17794, 2210, 6169, 10102, 21061, 17662, 1468, 12282, 6350, 9035, 1820, 23652, 7301, 8925, 8701, 3533, 9462, 9123, 12788, 17729, 65552, 1261, 21476, 33770, 9380, 2569654, 33556, 53656, 44143, 32612, 10671, 261, 44570, 41922, 2552, 2417, 19319, 43969, 8921, 8993, 955, 32345, 966, 1920, 17318, 1510, 14180, 26005, 554, 16408, 42028, 112091, 13886, 13942, 1673, 54946 or 2419 to lower levels than detected, i.e. to decrease the effectiveness of the agent. According to such an embodiment, 1722, 10280, 59917, 85553, 10653, 9235, 21668, 17794, 2210, 6169, 10102, 21061, 17662, 1468, 12282, 6350, 9035, 1820, 23652, 7301, 8925, 8701, 3533, 9462, 9123, 12788, 17729, 65552, 1261, 21476, 33770, 9380, 2569654, 33556, 53656, 44143, 32612, 10671, 261, 44570, 41922, 2552, 2417, 19319, 43969, 8921, 8993, 955, 32345, 966, 1920, 17318, 1510, 14180, 26005, 554, 16408, 42028, 112091, 13886, 13942, 1673, 54946 or 2419 expression or activity may be used as an indicator of the effectiveness of an agent, even in the absence of an observable phenotypic response.

[0372] IV. Methods of Treatment of Subjects Suffering From Cardiovascular Disease:

[0373] The present invention provides for both prophylactic and therapeutic methods of treating a subject, e.g., a human, at risk of (or susceptible to) a cardiovascular disease such as atherosclerosis, ischemia/reperfusion injury, hypertension, restenosis, arterial inflammation, thrombosis, and endothelial cell disorders. With regard to both prophylactic and therapeutic methods of treatment, such treatments may be specifically tailored or modified, based on knowledge obtained from the field of pharmacogenomics. “Pharmacogenomics,” as used herein, refers to the application of genomics technologies such as gene sequencing, statistical genetics, and gene expression analysis to drugs in clinical development and on the market. More specifically, the term refers to the study of how a patient's genes determine his or her response to a drug (e.g., a patient's “drug response phenotype”, or “drug response genotype”).

[0374] Thus, another aspect of the invention provides methods for tailoring an subject's prophylactic or therapeutic treatment with either the 1722, 10280, 59917, 85553, 10653, 9235, 21668, 17794, 2210, 6169, 10102, 21061, 17662, 1468, 12282, 6350, 9035, 1820, 23652, 7301, 8925, 8701, 3533, 9462, 9123, 12788, 17729, 65552, 1261, 21476, 33770, 9380, 2569654, 33556, 53656, 44143, 32612, 10671, 261, 44570, 41922, 2552, 2417, 19319, 43969, 8921, 8993, 955, 32345, 966, 1920, 17318, 1510, 14180, 26005, 554, 16408, 42028, 112091, 13886, 13942, 1673, 54946 or 2419 molecules of the present invention or 1722, 10280, 59917, 85553, 10653, 9235, 21668, 17794, 2210, 6169, 10102, 21061, 17662, 1468, 12282, 6350, 9035, 1820, 23652, 7301, 8925, 8701, 3533, 9462, 9123, 12788, 17729, 65552, 1261, 21476, 33770, 9380, 2569654, 33556, 53656, 44143, 32612, 10671, 261, 44570, 41922, 2552, 2417, 19319, 43969, 8921, 8993, 955, 32345, 966, 1920, 17318, 1510, 14180, 26005, 554, 16408, 42028, 112091, 13886, 13942, 1673, 54946 or 2419 modulators according to that individual's drug response genotype. Pharmacogenomics allows a clinician or physician to target prophylactic or therapeutic treatments to patients who will most benefit from the treatment and to avoid treatment of patients who will experience toxic drug-related side effects.

[0375] A. Prophylactic Methods

[0376] In one aspect, the invention provides a method for preventing in a subject, a cardiovascular disease by administering to the subject an agent which modulates 1722, 10280, 59917, 85553, 10653, 9235, 21668, 17794, 2210, 6169, 10102, 21061, 17662, 1468, 12282, 6350, 9035, 1820, 23652, 7301, 8925, 8701, 3533, 9462, 9123, 12788, 17729, 65552, 1261, 21476, 33770, 9380, 2569654, 33556, 53656, 44143, 32612, 10671, 261, 44570, 41922, 2552, 2417, 19319, 43969, 8921, 8993, 955, 32345, 966, 1920, 17318, 1510, 14180, 26005, 554, 16408, 42028, 112091, 13886, 13942, 1673, 54946 or 2419 expression or 1722, 10280, 59917, 85553, 10653, 9235, 21668, 17794, 2210, 6169, 10102, 21061, 17662, 1468, 12282, 6350, 9035, 1820, 23652, 7301, 8925, 8701, 3533, 9462, 9123, 12788, 17729, 65552, 1261, 21476, 33770, 9380, 2569654, 33556, 53656, 44143, 32612, 10671, 261, 44570, 41922, 2552, 2417, 19319, 43969, 8921, 8993, 955, 32345, 966, 1920, 17318, 1510, 14180, 26005, 554, 16408, 42028, 112091, 13886, 13942, 1673, 54946 or 2419 activity, e.g., modulation of calcium influx, cellular migration, or formation of atherosclerotic lesions. Subjects at risk for a cardiovascular disease, e.g., atherosclerosis and/or thrombosis, can be identified by, for example, any or a combination of the diagnostic or prognostic assays described herein. Administration of a prophylactic agent can occur prior to the manifestation of symptoms characteristic of aberrant 1722, 10280, 59917, 85553, 10653, 9235, 21668, 17794, 2210, 6169, 10102, 21061, 17662, 1468, 12282, 6350, 9035, 1820, 23652, 7301, 8925, 8701, 3533, 9462, 9123, 12788, 17729, 65552, 1261, 21476, 33770, 9380, 2569654, 33556, 53656, 44143, 32612, 10671, 261, 44570, 41922, 2552, 2417, 19319, 43969, 8921, 8993, 955, 32345, 966, 1920, 17318, 1510, 14180, 26005, 554, 16408, 42028, 112091, 13886, 13942, 1673, 54946 or 2419 expression or activity, such that a cardiovascular disease is prevented or, alternatively, delayed in its progression. Depending on the type of 1722, 10280, 59917, 85553, 10653, 9235, 21668, 17794, 2210, 6169, 10102, 21061, 17662, 1468, 12282, 6350, 9035, 1820, 23652, 7301, 8925, 8701, 3533, 9462, 9123, 12788, 17729, 65552, 1261, 21476, 33770, 9380, 2569654, 33556, 53656, 44143, 32612, 10671, 261, 44570, 41922, 2552, 2417, 19319, 43969, 8921, 8993, 955, 32345, 966, 1920, 17318, 1510, 14180, 26005, 554, 16408, 42028, 112091, 13886, 13942, 1673, 54946 or 2419 aberrancy, for example, a 1722, 10280, 59917, 85553, 10653, 9235, 21668, 17794, 2210, 6169, 10102, 21061, 17662, 1468, 12282, 6350, 9035, 1820, 23652, 7301, 8925, 8701, 3533, 9462, 9123, 12788, 17729, 65552, 1261, 21476, 33770, 9380, 2569654, 33556, 53656, 44143, 32612, 10671, 261, 44570, 41922, 2552, 2417, 19319, 43969, 8921, 8993, 955, 32345, 966, 1920, 17318, 1510, 14180, 26005, 554, 16408, 42028, 112091, 13886, 13942, 1673, 54946 or 2419, 1722, 10280, 59917, 85553, 10653, 9235, 21668, 17794, 2210, 6169, 10102, 21061, 17662, 1468, 12282, 6350, 9035, 1820, 23652, 7301, 8925, 8701, 3533, 9462, 9123, 12788, 17729, 65552, 1261, 21476, 33770, 9380, 2569654, 33556, 53656, 44143, 32612, 10671, 261, 44570, 41922, 2552, 2417, 19319, 43969, 8921, 8993, 955, 32345, 966, 1920, 17318, 1510, 14180, 26005, 554, 16408, 42028, 112091, 13886, 13942, 1673, 54946 or 2419 agonist or 1722, 10280, 59917, 85553, 10653, 9235, 21668, 17794, 2210, 6169, 10102, 21061, 17662, 1468, 12282, 6350, 9035, 1820, 23652, 7301, 8925, 8701, 3533, 9462, 9123, 12788, 17729, 65552, 1261, 21476, 33770, 9380, 2569654, 33556, 53656, 44143, 32612, 10671, 261, 44570, 41922, 2552, 2417, 19319, 43969, 8921, 8993, 955, 32345, 966, 1920, 17318, 1510, 14180, 26005, 554, 16408, 42028, 112091, 13886, 13942, 1673, 54946 or 2419 antagonist agent can be used for treating the subject. The appropriate agent can be determined based on screening assays described herein.

[0377] B. Therapeutic Methods

[0378] Described herein are methods and compositions whereby cardiovascular disease symptoms may be ameliorated. Certain cardiovascular diseases are brought about, at least in part, by an excessive level of a gene product, or by the presence of a gene product exhibiting an abnormal or excessive activity. As such, the reduction in the level and/or activity of such gene products would bring about the amelioration of cardiovascular disease symptoms. Techniques for the reduction of gene expression levels or the activity of a protein are discussed below.

[0379] Alternatively, certain other cardiovascular diseases are brought about, at least in part, by the absence or reduction of the level of gene expression, or a reduction in the level of a protein's activity. As such, an increase in the level of gene expression and/or the activity of such proteins would bring about the amelioration of cardiovascular disease symptoms.

[0380] In some cases, the up-regulation of a gene in a disease state reflects a protective role for that gene product in responding to the disease condition. Enhancement of such a gene's expression, or the activity of the gene product, will reinforce the protective effect it exerts. Some cardiovascular disease states may result from an abnormally low level of activity of such a protective gene. In these cases also, an increase in the level of gene expression and/or the activity of such gene products would bring about the amelioration of cardiovascular disease symptoms. Techniques for increasing target gene expression levels or target gene product activity levels are discussed herein.

[0381] Accordingly, another aspect of the invention pertains to methods of modulating 1722, 10280, 59917, 85553, 10653, 9235, 21668, 17794, 2210, 6169, 10102, 21061, 17662, 1468, 12282, 6350, 9035, 1820, 23652, 7301, 8925, 8701, 3533, 9462, 9123, 12788, 17729, 65552, 1261, 21476, 33770, 9380, 2569654, 33556, 53656, 44143, 32612, 10671, 261, 44570, 41922, 2552, 2417, 19319, 43969, 8921, 8993, 955, 32345, 966, 1920, 17318, 1510, 14180, 26005, 554, 16408, 42028, 112091, 13886, 13942, 1673, 54946 or 2419 expression or activity for therapeutic purposes. Accordingly, in an exemplary embodiment, the modulatory method of the invention involves contacting a cell with a 1722, 10280, 59917, 85553, 10653, 9235, 21668, 17794, 2210, 6169, 10102, 21061, 17662, 1468, 12282, 6350, 9035, 1820, 23652, 7301, 8925, 8701, 3533, 9462, 9123, 12788, 17729, 65552, 1261, 21476, 33770, 9380, 2569654, 33556, 53656, 44143, 32612, 10671, 261, 44570, 41922, 2552, 2417, 19319, 43969, 8921, 8993, 955, 32345, 966, 1920, 17318, 1510, 14180, 26005, 554, 16408, 42028, 112091, 13886, 13942, 1673, 54946 or 2419 or agent that modulates one or more of the activities of 1722, 10280, 59917, 85553, 10653, 9235, 21668, 17794, 2210, 6169, 10102, 21061, 17662, 1468, 12282, 6350, 9035, 1820, 23652, 7301, 8925, 8701, 3533, 9462, 9123, 12788, 17729, 65552, 1261, 21476, 33770, 9380, 2569654, 33556, 53656, 44143, 32612, 10671, 261, 44570, 41922, 2552, 2417, 19319, 43969, 8921, 8993, 955, 32345, 966, 1920, 17318, 1510, 14180, 26005, 554, 16408, 42028, 112091, 13886, 13942, 1673, 54946 or 2419 protein activity associated with the cell (e.g., an endothelial cell or an ovarian cell). An agent that modulates 1722, 10280, 59917, 85553, 10653, 9235, 21668, 17794, 2210, 6169, 10102, 21061, 17662, 1468, 12282, 6350, 9035, 1820, 23652, 7301, 8925, 8701, 3533, 9462, 9123, 12788, 17729, 65552, 1261, 21476, 33770, 9380, 2569654, 33556, 53656, 44143, 32612, 10671, 261, 44570, 41922, 2552, 2417, 19319, 43969, 8921, 8993, 955, 32345, 966, 1920, 17318, 1510, 14180, 26005, 554, 16408, 42028, 112091, 13886, 13942, 1673, 54946 or 2419 protein activity can be an agent as described herein, such as a nucleic acid or a protein, a naturally-occurring target molecule of a 1722, 10280, 59917, 85553, 10653, 9235, 21668, 17794, 2210, 6169, 10102, 21061, 17662, 1468, 12282, 6350, 9035, 1820, 23652, 7301, 8925, 8701, 3533, 9462, 9123, 12788, 17729, 65552, 1261, 21476, 33770, 9380, 2569654, 33556, 53656, 44143, 32612, 10671, 261, 44570, 41922, 2552, 2417, 19319, 43969, 8921, 8993, 955, 32345, 966, 1920, 17318, 1510, 14180, 26005, 554, 16408, 42028, 112091, 13886, 13942, 1673, 54946 or 2419 protein (e.g., a 1722, 10280, 59917, 85553, 10653, 9235, 21668, 17794, 2210, 6169, 10102, 21061, 17662, 1468, 12282, 6350, 9035, 1820, 23652, 7301, 8925, 8701, 3533, 9462, 9123, 12788, 17729, 65552, 1261, 21476, 33770, 9380, 2569654, 33556, 53656, 44143, 32612, 10671, 261, 44570, 41922, 2552, 2417, 19319, 43969, 8921, 8993, 955, 32345, 966, 1920, 17318, 1510, 14180, 26005, 554, 16408, 42028, 112091, 13886, 13942, 1673, 54946 or 2419 ligand or substrate), a 1722, 10280, 59917, 85553, 10653, 9235, 21668, 17794, 2210, 6169, 10102, 21061, 17662, 1468, 12282, 6350, 9035, 1820, 23652, 7301, 8925, 8701, 3533, 9462, 9123, 12788, 17729, 65552, 1261, 21476, 33770, 9380, 2569654, 33556, 53656, 44143, 32612, 10671, 261, 44570, 41922, 2552, 2417, 19319, 43969, 8921, 8993, 955, 32345, 966, 1920, 17318, 1510, 14180, 26005, 554, 16408, 42028, 112091, 13886, 13942, 1673, 54946 or 2419 antibody, a 1722, 10280, 59917, 85553, 10653, 9235, 21668, 17794, 2210, 6169, 10102, 21061, 17662, 1468, 12282, 6350, 9035, 1820, 23652, 7301, 8925, 8701, 3533, 9462, 9123, 12788, 17729, 65552, 1261, 21476, 33770, 9380, 2569654, 33556, 53656, 44143, 32612, 10671, 261, 44570, 41922, 2552, 2417, 19319, 43969, 8921, 8993, 955, 32345, 966, 1920, 17318, 1510, 14180, 26005, 554, 16408, 42028, 112091, 13886, 13942, 1673, 54946 or 2419 agonist or antagonist, a peptidomimetic of a 1722, 10280, 59917, 85553, 10653, 9235, 21668, 17794, 2210, 6169, 10102, 21061, 17662, 1468, 12282, 6350, 9035, 1820, 23652, 7301, 8925, 8701, 3533, 9462, 9123, 12788, 17729, 65552, 1261, 21476, 33770, 9380, 2569654, 33556, 53656, 44143, 32612, 10671, 261, 44570, 41922, 2552, 2417, 19319, 43969, 8921, 8993, 955, 32345, 966, 1920, 17318, 1510, 14180, 26005, 554, 16408, 42028, 112091, 13886, 13942, 1673, 54946 or 2419 agonist or antagonist, or other small molecule. In one embodiment, the agent stimulates one or more 1722, 10280, 59917, 85553, 10653, 9235, 21668, 17794, 2210, 6169, 10102, 21061, 17662, 1468, 12282, 6350, 9035, 1820, 23652, 7301, 8925, 8701, 3533, 9462, 9123, 12788, 17729, 65552, 1261, 21476, 33770, 9380, 2569654, 33556, 53656, 44143, 32612, 10671, 261, 44570, 41922, 2552, 2417, 19319, 43969, 8921, 8993, 955, 32345, 966, 1920, 17318, 1510, 14180, 26005, 554, 16408, 42028, 112091, 13886, 13942, 1673, 54946 or 2419 activities. Examples of such stimulatory agents include active 1722, 10280, 59917, 85553, 10653, 9235, 21668, 17794, 2210, 6169, 10102, 21061, 17662, 1468, 12282, 6350, 9035, 1820, 23652, 7301, 8925, 8701, 3533, 9462, 9123, 12788, 17729, 65552, 1261, 21476, 33770, 9380, 2569654, 33556, 53656, 44143, 32612, 10671, 261, 44570, 41922, 2552, 2417, 19319, 43969, 8921, 8993, 955, 32345, 966, 1920, 17318, 1510, 14180, 26005, 554, 16408, 42028, 112091, 13886, 13942, 1673, 54946 or 2419 protein and a nucleic acid molecule encoding 1722, 10280, 59917, 85553, 10653, 9235, 21668, 17794, 2210, 6169, 10102, 21061, 17662, 1468, 12282, 6350, 9035, 1.820, 23652, 7301, 8925, 8701, 3533, 9462, 9123, 12788, 17729, 65552, 1261, 21476, 33770, 9380, 2569654, 33556, 53656, 44143, 32612, 10671, 261, 44570, 41922, 2552, 2417, 19319, 43969, 8921, 8993, 955, 32345, 966, 1920, 17318, 1510, 14180, 26005, 554, 16408, 42028, 112091, 13886, 13942, 1673, 54946 or 2419 that has been introduced into the cell. In another embodiment, the agent inhibits one or more 1722, 10280, 59917, 85553, 10653, 9235, 21668, 17794, 2210, 6169, 10102, 21061, 17662, 1468, 12282, 6350, 9035, 1820, 23652, 7301, 8925, 8701, 3533, 9462, 9123, 12788, 17729, 65552, 1261, 21476, 33770, 9380, 2569654, 33556, 53656, 44143, 32612, 10671, 261, 44570, 41922, 2552, 2417, 19319, 43969, 8921, 8993, 955, 32345, 966, 1920, 17318, 1510, 14180, 26005, 554, 16408, 42028, 112091, 13886, 13942, 1673, 54946 or 2419 activities. Examples of such inhibitory agents include antisense 1722, 10280, 59917, 85553, 10653, 9235, 21668, 17794, 2210, 6169, 10102, 21061, 17662, 1468, 12282, 6350, 9035, 1820, 23652, 7301, 8925, 8701, 3533, 9462, 9123, 12788, 17729, 65552, 1261, 21476, 33770, 9380, 2569654, 33556, 53656, 44143, 32612, 10671, 261, 44570, 41922, 2552, 2417, 19319, 43969, 8921, 8993, 955, 32345, 966, 1920, 17318, 1510, 14180, 26005, 554, 16408, 42028, 112091, 13886, 13942, 1673, 54946 or 2419 nucleic acid molecules, anti-1722, 10280, 59917, 85553, 10653, 9235, 21668, 17794, 2210, 6169, 10102, 21061, 17662, 1468, 12282, 6350, 9035, 1820, 23652, 7301, 8925, 8701, 3533, 9462, 9123, 12788, 17729, 65552, 1261, 21476, 33770, 9380, 2569654, 33556, 53656, 44143, 32612, 10671, 261, 44570, 41922, 2552, 2417, 19319, 43969, 8921, 8993, 955, 32345, 966, 1920, 17318, 1510, 14180, 26005, 554, 16408, 42028, 112091, 13886, 13942, 1673, 54946 or 2419 antibodies, and 1722, 10280, 59917, 85553, 10653, 9235, 21668, 17794, 2210, 6169, 10102, 21061, 17662, 1468, 12282, 6350, 9035, 1820, 23652, 7301, 8925, 8701, 3533, 9462, 9123, 12788, 17729, 65552, 1261, 21476, 33770, 9380, 2569654, 33556, 53656, 44143, 32612, 10671, 261, 44570, 41922, 2552, 2417, 19319, 43969, 8921, 8993, 955, 32345, 966, 1920, 17318, 1510, 14180, 26005, 554, 16408, 42028, 112091, 13886, 13942, 1673, 54946 or 2419 inhibitors. These modulatory methods can be performed in vitro (e.g., by culturing the cell with the agent) or, alternatively, in vivo (e.g., by administering the agent to a subject). As such, the present invention provides methods of treating an individual afflicted with a disease or disorder characterized by aberrant or unwanted expression or activity of a 1722, 10280, 59917, 85553, 10653, 9235, 21668, 17794, 2210, 6169, 10102, 21061, 17662, 1468, 12282, 6350, 9035, 1820, 23652, 7301, 8925, 8701, 3533, 9462, 9123, 12788, 17729, 65552, 1261, 21476, 33770, 9380, 2569654, 33556, 53656, 44143, 32612, 10671, 261, 44570, 41922, 2552, 2417, 19319, 43969, 8921, 8993, 955, 32345, 966, 1920, 17318, 1510, 14180, 26005, 554, 16408, 42028, 112091, 13886, 13942, 1673, 54946 or 2419 protein or nucleic acid molecule. In one embodiment, the method involves administering an agent (e.g., an agent identified by a screening assay described herein), or combination of agents that modulates (e.g., upregulates or downregulates) 1722, 10280, 59917, 85553, 10653, 9235, 21668, 17794, 2210, 6169, 10102, 21061, 17662, 1468, 12282, 6350, 9035, 1820, 23652, 7301, 8925, 8701, 3533, 9462, 9123, 12788, 17729, 65552, 1261, 21476, 33770, 9380, 2569654, 33556, 53656, 44143, 32612, 10671, 261, 44570, 41922, 2552, 2417, 19319, 43969, 8921, 8993, 955, 32345, 966, 1920, 17318, 1510, 14180, 26005, 554, 16408, 42028, 112091, 13886, 13942, 1673, 54946 or 2419 expression or activity. In another embodiment, the method involves administering a 1722, 10280, 59917, 85553, 10653, 9235, 21668, 17794, 2210, 6169, 10102, 21061, 17662, 1468, 12282, 6350, 9035, 1820, 23652, 7301, 8925, 8701, 3533, 9462, 9123, 12788, 17729, 65552, 1261, 21476, 33770, 9380, 2569654, 33556, 53656, 44143, 32612, 10671, 261, 44570, 41922, 2552, 2417, 19319, 43969, 8921, 8993, 955, 32345, 966, 1920, 17318, 1510, 14180, 26005, 554, 16408, 42028, 112091, 13886, 13942, 1673, 54946 or 2419 protein or nucleic acid molecule as therapy to compensate for reduced, aberrant, or unwanted 1722, 10280, 59917, 85553, 10653, 9235, 21668, 17794, 2210, 6169, 10102, 21061, 17662, 1468, 12282, 6350, 9035, 1820, 23652, 7301, 8925, 8701, 3533, 9462, 9123, 12788, 17729, 65552, 1261, 21476, 33770, 9380, 2569654, 33556, 53656, 44143, 32612, 10671, 261, 44570, 41922, 2552, 2417, 19319, 43969, 8921, 8993, 955, 32345, 966, 1920, 17318, 1510, 14180, 26005, 554, 16408, 42028, 112091, 13886, 13942, 1673, 54946 or 2419 expression or activity.

[0382] Stimulation of 1722, 10280, 59917, 85553, 10653, 9235, 21668, 17794, 2210, 6169, 10102, 21061, 17662, 1468, 12282, 6350, 9035, 1820, 23652, 7301, 8925, 8701, 3533, 9462, 9123, 12788, 17729, 65552, 1261, 21476, 33770, 9380, 2569654, 33556, 53656, 44143, 32612, 10671, 261, 44570, 41922, 2552, 2417, 19319, 43969, 8921, 8993, 955, 32345, 966, 1920, 17318, 1510, 14180, 26005, 554, 16408, 42028, 112091, 13886, 13942, 1673, 54946 or 2419 activity is desirable in situations in which 1722, 10280, 59917, 85553, 10653, 9235, 21668, 17794, 2210, 6169, 10102, 21061, 17662, 1468, 12282, 6350, 9035, 1820, 23652, 7301, 8925, 8701, 3533, 9462, 9123, 12788, 17729, 65552, 1261, 21476, 33770, 9380, 2569654, 33556, 53656, 44143, 32612, 10671, 261, 44570, 41922, 2552, 2417, 19319, 43969, 8921, 8993, 955, 32345, 966, 1920, 17318, 1510, 14180, 26005, 554, 16408, 42028, 112091, 13886, 13942, 1673, 54946 or 2419 is abnormally downregulated and/or in which increased 1722, 10280, 59917, 85553, 10653, 9235, 21668, 17794, 2210, 6169, 10102, 21061, 17662, 1468, 12282, 6350, 9035, 1820, 23652, 7301, 8925, 8701, 3533, 9462, 9123, 12788, 17729, 65552, 1261, 21476, 33770, 9380, 2569654, 33556, 53656, 44143, 32612, 10671, 261, 44570, 41922, 2552, 2417, 19319, 43969, 8921, 8993, 955, 32345, 966, 1920, 17318, 1510, 14180, 26005, 554, 16408, 42028, 112091, 13886, 13942, 1673, 54946 or 2419 activity is likely to have a beneficial effect. Likewise, inhibition of 1722, 10280, 59917, 85553, 10653, 9235, 21668, 17794, 2210, 6169, 10102, 21061, 17662, 1468, 12282, 6350, 9035, 1820, 23652, 7301, 8925, 8701, 3533, 9462, 9123, 12788, 17729, 65552, 1261, 21476, 33770, 9380, 2569654, 33556, 53656, 44143, 32612, 10671, 261, 44570, 41922, 2552, 2417, 19319, 43969, 8921, 8993, 955, 32345, 966, 1920, 17318, 1510, 14180, 26005, 554, 16408, 42028, 112091, 13886, 13942, 1673, 54946 or 2419 activity is desirable in situations in which 1722, 10280, 59917, 85553, 10653, 9235, 21668, 17794, 2210, 6169, 10102, 21061, 17662, 1468, 12282, 6350, 9035, 1820, 23652, 7301, 8925, 8701, 3533, 9462, 9123, 12788, 17729, 65552, 1261, 21476, 33770, 9380, 2569654, 33556, 53656, 44143, 32612, 10671, 261, 44570, 41922, 2552, 2417, 19319, 43969, 8921, 8993, 955, 32345, 966, 1920, 17318, 1510, 14180, 26005, 554, 16408, 42028, 112091, 13886, 13942, 1673, 54946 or 2419 is abnormally upregulated and/or in which decreased 1722, 10280, 59917, 85553, 10653, 9235, 21668, 17794, 2210, 6169, 10102, 21061, 17662, 1468, 12282, 6350, 9035, 1820, 23652, 7301, 8925, 8701, 3533, 9462, 9123, 12788, 17729, 65552, 1261, 21476, 33770, 9380, 2569654, 33556, 53656, 44143, 32612, 10671, 261, 44570, 41922, 2552, 2417, 19319, 43969, 8921, 8993, 955, 32345, 966, 1920, 17318, 1510, 14180, 26005, 554, 16408, 42028, 112091, 13886, 13942, 1673, 54946 or 2419 activity is likely to have a beneficial effect.

[0383] (i) Methods for Inhibiting Target Gene Expression, Synthesis, or Activity

[0384] As discussed above, genes involved in cardiovascular disorders may cause such disorders via an increased level of gene activity. In some cases, such up-regulation may have a causative or exacerbating effect on the disease state. A variety of techniques may be used to inhibit the expression, synthesis, or activity of such genes and/or proteins.

[0385] For example, compounds such as those identified through assays described above, which exhibit inhibitory activity, may be used in accordance with the invention to ameliorate cardiovascular disease symptoms. Such molecules may include, but are not limited to, small organic molecules, peptides, antibodies, and the like.

[0386] For example, compounds can be administered that compete with endogenous ligand for the 1722, 10280, 59917, 85553, 10653, 9235, 21668, 17794, 2210, 6169, 10102, 21061, 17662, 1468, 12282, 6350, 9035, 1820, 23652, 7301, 8925, 8701, 3533, 9462, 9123, 12788, 17729, 65552, 1261, 21476, 33770, 9380, 2569654, 33556, 53656, 44143, 32612, 10671, 261, 44570, 41922, 2552, 2417, 19319, 43969, 8921, 8993, 955, 32345, 966, 1920, 17318, 1510, 14180, 26005, 554, 16408, 42028, 112091, 13886, 13942, 1673, 54946 or 2419 protein. The resulting reduction in the amount of ligand-bound 1722, 10280, 59917, 85553, 10653, 9235, 21668, 17794, 2210, 6169, 10102, 21061, 17662, 1468, 12282, 6350, 9035, 1820, 23652, 7301, 8925, 8701, 3533, 9462, 9123, 12788, 17729, 65552, 1261, 21476, 33770, 9380, 2569654, 33556, 53656, 44143, 32612, 10671, 261, 44570, 41922, 2552, 2417, 19319, 43969, 8921, 8993, 955, 32345, 966, 1920, 17318, 1510, 14180, 26005, 554, 16408, 42028, 112091, 13886, 13942, 1673, 54946 or 2419 protein will modulate endothelial cell physiology. Compounds that can be particularly useful for this purpose include, for example, soluble proteins or peptides, such as peptides comprising one or more of the extracellular domains, or portions and/or analogs thereof, of the 1722, 10280, 59917, 85553, 10653, 9235, 21668, 17794, 2210, 6169, 10102, 21061, 17662, 1468, 12282, 6350, 9035, 1820, 23652, 7301, 8925, 8701, 3533, 9462, 9123, 12788, 17729, 65552, 1261, 21476, 33770, 9380, 2569654, 33556, 53656, 44143, 32612, 10671, 261, 44570, 41922, 2552, 2417, 19319, 43969, 8921, 8993, 955, 32345, 966, 1920, 17318, 1510, 14180, 26005, 554, 16408, 42028, 112091, 13886, 13942, 1673, 54946 or 2419 protein, including, for example, soluble fusion proteins such as Ig-tailed fusion proteins. (For a discussion of the production of Ig-tailed fusion proteins, see, for example, U.S. Pat. No. 5,116,964). Alternatively, compounds, such as ligand analogs or antibodies, that bind to the 1722, 10280, 59917, 85553, 10653, 9235, 21668, 17794, 2210, 6169, 10102, 21061, 17662, 1468, 12282, 6350, 9035, 1820, 23652, 7301, 8925, 8701, 3533, 9462, 9123, 12788, 17729, 65552, 1261, 21476, 33770, 9380, 2569654, 33556, 53656, 44143, 32612, 10671, 261, 44570, 41922, 2552, 2417, 19319, 43969, 8921, 8993, 955, 32345, 966, 1920, 17318, 1510, 14180, 26005, 554, 16408, 42028, 112091, 13886, 13942, 1673, 54946 or 2419 receptor site, but do not activate the protein, (e.g., receptor-ligand antagonists) can be effective in inhibiting 1722, 10280, 59917, 85553, 10653, 9235, 21668, 17794, 2210, 6169, 10102, 21061, 17662, 1468, 12282, 6350, 9035, 1820, 23652, 7301, 8925, 8701, 3533, 9462, 9123, 12788, 17729, 65552, 1261, 21476, 33770, 9380, 2569654, 33556, 53656, 44143, 32612, 10671, 261, 44570, 41922, 2552, 2417, 19319, 43969, 8921, 8993, 955, 32345, 966, 1920, 17318, 1510, 14180, 26005, 554, 16408, 42028, 112091, 13886, 13942, 1673, 54946 or 2419 protein activity.

[0387] Further, antisense and ribozyme molecules which inhibit expression of the 1722, 10280, 59917, 85553, 10653, 9235, 21668, 17794, 2210, 6169, 10102, 21061, 17662, 1468, 12282, 6350, 9035, 1820, 23652, 7301, 8925, 8701, 3533, 9462, 9123, 12788, 17729, 65552, 1261, 21476, 33770, 9380, 2569654, 33556, 53656, 44143, 32612, 10671, 261, 44570, 41922, 2552, 2417, 19319, 43969, 8921, 8993, 955, 32345, 966, 1920, 17318, 1510, 14180, 26005, 554, 16408, 42028, 112091, 13886, 13942, 1673, 54946 or 2419 gene may also be used in accordance with the invention to inhibit aberrant 1722, 10280, 59917, 85553, 10653, 9235, 21668, 17794, 2210, 6169, 10102, 21061, 17662, 1468, 12282, 6350, 9035, 1820, 23652, 7301, 8925, 8701, 3533, 9462, 9123, 12788, 17729, 65552, 1261, 21476, 33770, 9380, 2569654, 33556, 53656, 44143, 32612, 10671, 261, 44570, 41922, 2552, 2417, 19319, 43969, 8921, 8993, 955, 32345, 966, 1920, 17318, 1510, 14180, 26005, 554, 16408, 42028, 112091, 13886, 13942, 1673, 54946 or 2419 gene activity. Still further, triple helix molecules may be utilized in inhibiting aberrant 1722, 10280, 59917, 85553, 10653, 9235, 21668, 17794, 2210, 6169, 10102, 21061, 17662, 1468, 12282, 6350, 9035, 1820, 23652, 7301, 8925, 8701, 3533, 9462, 9123, 12788, 17729, 65552, 1261, 21476, 33770, 9380, 2569654, 33556, 53656, 44143, 32612, 10671, 261, 44570, 41922, 2552, 2417, 19319, 43969, 8921, 8993, 955, 32345, 966, 1920, 17318, 1510, 14180, 26005, 554, 16408, 42028, 112091, 13886, 13942, 1673, 54946 or 2419 gene activity.

[0388] The antisense nucleic acid molecules used in the methods of the invention are typically administered to a subject or generated in situ such that they hybridize with or bind to cellular mRNA and/or genomic DNA encoding a 1722, 10280, 59917, 85553, 10653, 9235, 21668, 17794, 2210, 6169, 10102, 21061, 17662, 1468, 12282, 6350, 9035, 1820, 23652, 7301, 8925, 8701, 3533, 9462, 9123, 12788, 17729, 65552, 1261, 21476, 33770, 9380, 2569654, 33556, 53656, 44143, 32612, 10671, 261, 44570, 41922, 2552, 2417, 19319, 43969, 8921, 8993, 955, 32345, 966, 1920, 17318, 1510, 14180, 26005, 554, 16408, 42028, 112091, 13886, 13942, 1673, 54946 or 2419 protein to thereby inhibit expression of the protein, e.g., by inhibiting transcription and/or translation. The hybridization can be by conventional nucleotide complementarity to form a stable duplex, or, for example, in the case of an antisense nucleic acid molecule which binds to DNA duplexes, through specific interactions in the major groove of the double helix. An example of a route of administration of antisense nucleic acid molecules of the invention include direct injection at a tissue site. Alternatively, antisense nucleic acid molecules can be modified to target selected cells and then administered systemically. For example, for systemic administration, antisense molecules can be modified such that they specifically bind to receptors or antigens expressed on a selected cell surface, e.g., by linking the antisense nucleic acid molecules to peptides or antibodies which bind to cell surface receptors or antigens. The antisense nucleic acid molecules can also be delivered to cells using the vectors described herein. To achieve sufficient intracellular concentrations of the antisense molecules, vector constructs in which the antisense nucleic acid molecule is placed under the control of a strong po1 II or po1 III promoter are preferred.

[0389] In yet another embodiment, an antisense nucleic acid molecule used in the methods of the invention is an α-anomeric nucleic acid molecule. An α-anomeric nucleic acid molecule forms specific double-stranded hybrids with complementary RNA in which, contrary to the usual β-units, the strands run parallel to each other (Gaultier et al. (1987) Nucleic Acids. Res. 15:6625-6641). The antisense nucleic acid molecule can also comprise a 2′-o-methylribonucleotide (Inoue et al. (1987) Nucleic Acids Res. 15:6131-6148) or a chimeric RNA-DNA analogue (Inoue et al. (1987) FEBS Lett. 215:327-330).

[0390] In still another embodiment, an antisense nucleic acid used in the methods of the invention is a ribozyme. Ribozymes are catalytic RNA molecules with ribonuclease activity which are capable of cleaving a single-stranded nucleic acid, such as an mRNA, to which they have a complementary region. Thus, ribozymes (e.g., hammerhead ribozymes (described in Haselhoff and Gerlach (1988) Nature 334:585-591)) can be used to catalytically cleave 1722, 10280, 59917, 85553, 10653, 9235, 21668, 17794, 2210, 6169, 10102, 21061, 17662, 1468, 12282, 6350, 9035, 1820, 23652, 7301, 8925, 8701, 3533, 9462, 9123, 12788, 17729, 65552, 1261, 21476, 33770, 9380, 2569654, 33556, 53656, 44143, 32612, 10671, 261, 44570, 41922, 2552, 2417, 19319, 43969, 8921, 8993, 955, 32345, 966, 1920, 17318, 1510, 14180, 26005, 554, 16408, 42028, 112091, 13886, 13942, 1673, 54946 or 2419 mRNA transcripts to thereby inhibit translation of 1722, 10280, 59917, 85553, 10653, 9235, 21668, 17794, 2210, 6169, 10102, 21061, 17662, 1468, 12282, 6350, 9035, 1820, 23652, 7301, 8925, 8701, 3533, 9462, 9123, 12788, 17729, 65552, 1261, 21476, 33770, 9380, 2569654, 33556, 53656, 44143, 32612, 10671, 261, 44570, 41922, 2552, 2417, 19319, 43969, 8921, 8993, 955, 32345, 966, 1920, 17318, 1510, 14180, 26005, 554, 16408, 42028, 112091, 13886, 13942, 1673, 54946 or 2419 mRNA. A ribozyme having specificity for a 1722, 10280, 59917, 85553, 10653, 9235, 21668, 17794, 2210, 6169, 10102, 21061, 17662, 1468, 12282, 6350, 9035, 1820, 23652, 7301, 8925, 8701, 3533, 9462, 9123, 12788, 17729, 65552, 1261, 21476, 33770, 9380, 2569654, 33556, 53656, 44143, 32612, 10671, 261, 44570, 41922, 2552, 2417, 19319, 43969, 8921, 8993, 955, 32345, 966, 1920, 17318, 1510, 14180, 26005, 554, 16408, 42028, 112091, 13886, 13942, 1673, 54946 or 2419-encoding nucleic acid can be designed based upon the nucleotide sequence of a 1722, 10280, 59917, 85553, 10653, 9235, 21668, 17794, 2210, 6169, 10102, 21061, 17662, 1468, 12282, 6350, 9035, 1820, 23652, 7301, 8925, 8701, 3533, 9462, 9123, 12788, 17729, 65552, 1261, 21476, 33770, 9380, 2569654, 33556, 53656, 44143, 32612, 10671, 261, 44570, 41922, 2552, 2417, 19319, 43969, 8921, 8993, 955, 32345, 966, 1920, 17318, 1510, 14180, 26005, 554, 16408, 42028, 112091, 13886, 13942, 1673, 54946 or 2419 cDNA disclosed herein (i.e., SEQ ID NO:1, 3, 5, 7, 9, 11, 13, 15, 17, 19, 21, 23, 25, 27, 29, 31, 33, 35, 37, 39, 41, 43, 45, 47, 49, 51, 53, 55, 57, 59, 61, 63, 65, 67, 69, 71, 73, 75, 77, 79, 81, 83, 85, 87, 89, 91, 93, 95, 97, 99, 101, 103, 105, 107, 109, 111, 113, 115, 117, 119, 121, 123, 125 or 127). For example, a derivative of a Tetrahymena L-19 IVS RNA can be constructed in which the nucleotide sequence of the active site is complementary to the nucleotide sequence to be cleaved in a 1722, 10280, 59917, 85553, 10653, 9235, 21668, 17794, 2210, 6169, 10102, 21061, 17662, 1468, 12282, 6350, 9035, 1820, 23652, 7301, 8925, 8701, 3533, 9462, 9123, 12788, 17729, 65552, 1261, 21476, 33770, 9380, 2569654, 33556, 53656, 44143, 32612, 10671, 261, 44570, 41922, 2552, 2417, 19319, 43969, 8921, 8993, 955, 32345, 966, 1920, 17318, 1510, 14180, 26005, 554, 16408, 42028, 112091, 13886, 13942, 1673, 54946 or 2419-encoding mRNA (see, for example, Cech et al. U.S. Pat. No. 4,987,071; and Cech et al. U.S. Pat. No. 5,116,742). Alternatively, 1722, 10280, 59917, 85553, 10653, 9235, 21668, 17794, 2210, 6169, 10102, 21061, 17662, 1468, 12282, 6350, 9035, 1820, 23652, 7301, 8925, 8701, 3533, 9462, 9123, 12788, 17729, 65552, 1261, 21476, 33770, 9380, 2569654, 33556, 53656, 44143, 32612, 10671, 261, 44570, 41922, 2552, 2417, 19319, 43969, 8921, 8993, 955, 32345, 966, 1920, 17318, 1510, 14180, 26005, 554, 16408, 42028, 112091, 13886, 13942, 1673, 54946 or 2419 mRNA can be used to select a catalytic RNA having a specific ribonuclease activity from a pool of RNA molecules (see, for example, Bartel, D. and Szostak, J. W. (1993) Science 261:1411-1418).

[0391] 1722, 10280, 59917, 85553, 10653, 9235, 21668, 17794, 2210, 6169, 10102, 21061, 17662, 1468, 12282, 6350, 9035, 1820, 23652, 7301, 8925, 8701, 3533, 9462, 9123, 12788, 17729, 65552, 1261, 21476, 33770, 9380, 2569654, 33556, 53656, 44143, 32612, 10671, 261, 44570, 41922, 2552, 2417, 19319, 43969, 8921, 8993, 955, 32345, 966, 1920, 17318, 1510, 14180, 26005, 554, 16408, 42028, 112091, 13886, 13942, 1673, 54946 or 2419 gene expression can also be inhibited by targeting nucleotide sequences complementary to the regulatory region of the 1722, 10280, 59917, 85553, 10653, 9235, 21668, 17794, 2210, 6169, 10102, 21061, 17662, 1468, 12282, 6350, 9035, 1820, 23652, 7301, 8925, 8701, 3533, 9462, 9123, 12788, 17729, 65552, 1261, 21476, 33770, 9380, 2569654, 33556, 53656, 44143, 32612, 10671, 261, 44570, 41922, 2552, 2417, 19319, 43969, 8921, 8993, 955, 32345, 966, 1920, 17318, 1510, 14180, 26005, 554, 16408, 42028, 112091, 13886, 13942, 1673, 54946 or 2419 (e.g., the 1722, 10280, 59917, 85553, 10653, 9235, 21668, 17794, 2210, 6169, 10102, 21061, 17662, 1468, 12282, 6350, 9035, 1820, 23652, 7301, 8925, 8701, 3533, 9462, 9123, 12788, 17729, 65552, 1261, 21476, 33770, 9380, 2569654, 33556, 53656, 44143, 32612, 10671, 261, 44570, 41922, 2552, 2417, 19319, 43969, 8921, 8993, 955, 32345, 966, 1920, 17318, 1510, 14180, 26005, 554, 16408, 42028, 112091, 13886, 13942, 1673, 54946 or 2419 promoter and/or enhancers) to form triple helical structures that prevent transcription of the 1722, 10280, 59917, 85553, 10653, 9235, 21668, 17794, 2210, 6169, 10102, 21061, 17662, 1468, 12282, 6350, 9035, 1820, 23652, 7301, 8925, 8701, 3533, 9462, 9123, 12788, 17729, 65552, 1261, 21476, 33770, 9380, 2569654, 33556, 53656, 44143, 32612, 10671, 261, 44570, 41922, 2552, 2417, 19319, 43969, 8921, 8993, 955, 32345, 966, 1920, 17318, 1510, 14180, 26005, 554, 16408, 42028, 112091, 13886, 13942, 1673, 54946 or 2419 gene in target cells (see, for example, Helene, C. (1991) Anticancer Drug Des. 6(6):569-84; Helene, C. et al. (1992) Ann. N.Y. Acad. Sci. 660:27-36; and Maher, L. J. (1992) Bioassays 14(12):807-15).

[0392] Antibodies that are both specific for the 1722, 10280, 59917, 85553, 10653, 9235, 21668, 17794, 2210, 6169, 10102, 21061, 17662, 1468, 12282, 6350, 9035, 1820, 23652, 7301, 8925, 8701, 3533, 9462, 9123, 12788, 17729, 65552, 1261, 21476, 33770, 9380, 2569654, 33556, 53656, 44143, 32612, 10671, 261, 44570, 41922, 2552, 2417, 19319, 43969, 8921, 8993, 955, 32345, 966, 1920, 17318, 1510, 14180, 26005, 554, 16408, 42028, 112091, 13886, 13942, 1673, 54946 or 2419 protein and interfere with its activity may also be used to modulate or inhibit 1722, 10280, 59917, 85553, 10653, 9235, 21668, 17794, 2210, 6169, 10102, 21061, 17662, 1468, 12282, 6350, 9035, 1820, 23652, 7301, 8925, 8701, 3533, 9462, 9123, 12788, 17729, 65552, 1261, 21476, 33770, 9380, 2569654, 33556, 53656, 44143, 32612, 10671, 261, 44570, 41922, 2552, 2417, 19319, 43969, 8921, 8993, 955, 32345, 966, 1920, 17318, 1510, 14180, 26005, 554, 16408, 42028, 112091, 13886, 13942, 1673, 54946 or 2419 protein function. Such antibodies may be generated using standard techniques described herein, against the 1722, 10280, 59917, 85553, 10653, 9235, 21668, 17794, 2210, 6169, 10102, 21061, 17662, 1468, 12282, 6350, 9035, 1820, 23652, 7301, 8925, 8701, 3533, 9462, 9123, 12788, 17729, 65552, 1261, 21476, 33770, 9380, 2569654, 33556, 53656, 44143, 32612, 10671, 261, 44570, 41922, 2552, 2417, 19319, 43969, 8921, 8993, 955, 32345, 966, 1920, 17318, 1510, 14180, 26005, 554, 16408, 42028, 112091, 13886, 13942, 1673, 54946 or 2419 protein itself or against peptides corresponding to portions of the protein. Such antibodies include but are not limited to polyclonal, monoclonal, Fab fragments, single chain antibodies, or chimeric antibodies.

[0393] In instances where the target gene protein is intracellular and whole antibodies are used, internalizing antibodies may be preferred. Lipofectin liposomes may be used to deliver the antibody or a fragment of the Fab region which binds to the target epitope into cells. Where fragments of the antibody are used, the smallest inhibitory fragment which binds to the target protein's binding domain is preferred. For example, peptides having an amino acid sequence corresponding to the domain of the variable region of the antibody that binds to the target gene protein may be used. Such peptides may be synthesized chemically or produced via recombinant DNA technology using methods well known in the art (described in, for example, Creighton (1983), supra; and Sambrook et al. (1989) supra). Single chain neutralizing antibodies which bind to intracellular target gene epitopes may also be administered. Such single chain antibodies may be administered, for example, by expressing nucleotide sequences encoding single-chain antibodies within the target cell population by utilizing, for example, techniques such as those described in Marasco et al. (1993) Proc. Natl. Acad. Sci. USA 90:7889-7893).

[0394] In some instances, the target gene protein is extracellular, or is a transmembrane protein, such as the 1722, 10280, 59917, 85553, 10653, 9235, 21668, 17794, 2210, 6169, 10102, 21061, 17662, 1468, 12282, 6350, 9035, 1820, 23652, 7301, 8925, 8701, 3533, 9462, 9123, 12788, 17729, 65552, 1261, 21476, 33770, 9380, 2569654, 33556, 53656, 44143, 32612, 10671, 261, 44570, 41922, 2552, 2417, 19319, 43969, 8921, 8993, 955, 32345, 966, 1920, 17318, 1510, 14180, 26005, 554, 16408, 42028, 112091, 13886, 13942, 1673, 54946 or 2419 protein. Antibodies that are specific for one or more extracellular domains of the 1722, 10280, 59917, 85553, 10653, 9235, 21668, 17794, 2210, 6169, 10102, 21061, 17662, 1468, 12282, 6350, 9035, 1820, 23652, 7301, 8925, 8701, 3533, 9462, 9123, 12788, 17729, 65552, 1261, 21476, 33770, 9380, 2569654, 33556, 53656, 44143, 32612, 10671, 261, 44570, 41922, 2552, 2417, 19319, 43969, 8921, 8993, 955, 32345, 966, 1920, 17318, 1510, 14180, 26005, 554, 16408, 42028, 112091, 13886, 13942, 1673, 54946 or 2419 protein, for example, and that interfere with its activity, are particularly useful in treating cardiovascular disease. Such antibodies are especially efficient because they can access the target domains directly from the bloodstream. Any of the administration techniques described below which are appropriate for peptide administration may be utilized to effectively administer inhibitory target gene antibodies to their site of action.

[0395] (ii) Methods for Restoring or Enhancing Target Gene Activity

[0396] Genes that cause cardiovascular disease may be underexpressed within cardiovascular disease situations. Alternatively, the activity of the protein products of such genes may be decreased, leading to the development of cardiovascular disease symptoms. Such down-regulation of gene expression or decrease of protein activity might have a causative or exacerbating effect on the disease state.

[0397] In some cases, genes that are up-regulated in the disease state might be exerting a protective effect. A variety of techniques may be used to increase the expression, synthesis, or activity of genes and/or proteins that exert a protective effect in response to cardiovascular disease conditions.

[0398] Described in this section are methods whereby the level 1722, 10280, 59917, 85553, 10653, 9235, 21668, 17794, 2210, 6169, 10102, 21061, 17662, 1468, 12282, 6350, 9035, 1820, 23652, 7301, 8925, 8701, 3533, 9462, 9123, 12788, 17729, 65552, 1261, 21476, 33770, 9380, 2569654, 33556, 53656, 44143, 32612, 10671, 261, 44570, 41922, 2552, 2417, 19319, 43969, 8921, 8993, 955, 32345, 966, 1920, 17318, 1510, 14180, 26005, 554, 16408, 42028, 112091, 13886, 13942, 1673, 54946 or 2419 activity may be increased to levels wherein cardiovascular disease symptoms are ameliorated. The level of 1722, 10280, 59917, 85553, 10653, 9235, 21668, 17794, 2210, 6169, 10102, 21061, 17662, 1468, 12282, 6350, 9035, 1820, 23652, 7301, 8925, 8701, 3533, 9462, 9123, 12788, 17729, 65552, 1261, 21476, 33770, 9380, 2569654, 33556, 53656, 44143, 32612, 10671, 261, 44570, 41922, 2552, 2417, 19319, 43969, 8921, 8993, 955, 32345, 966, 1920, 17318, 1510, 14180, 26005, 554, 16408, 42028, 112091, 13886, 13942, 1673, 54946 or 2419 activity may be increased, for example, by either increasing the level of 1722, 10280, 59917, 85553, 10653, 9235, 21668, 17794, 2210, 6169, 10102, 21061, 17662, 1468, 12282, 6350, 9035, 1820, 23652, 7301, 8925, 8701, 3533, 9462, 9123, 12788, 17729, 65552, 1261, 21476, 33770, 9380, 2569654, 33556, 53656, 44143, 32612, 10671, 261, 44570, 41922, 2552, 2417, 19319, 43969, 8921, 8993, 955, 32345, 966, 1920, 17318, 1510, 14180, 26005, 554, 16408, 42028, 112091, 13886, 13942, 1673, 54946 or 2419 gene expression or by increasing the level of active 1722, 10280, 59917, 85553, 10653, 9235, 21668, 17794, 2210, 6169, 10102, 21061, 17662, 1468, 12282, 6350, 9035, 1820, 23652, 7301, 8925, 8701, 3533, 9462, 9123, 12788, 17729, 65552, 1261, 21476, 33770, 9380, 2569654, 33556, 53656, 44143, 32612, 10671, 261, 44570, 41922, 2552, 2417, 19319, 43969, 8921, 8993, 955, 32345, 966, 1920, 17318, 1510, 14180, 26005, 554, 16408, 42028, 112091, 13886, 13942, 1673, 54946 or 2419 protein which is present.

[0399] For example, a 1722, 10280, 59917, 85553, 10653, 9235, 21668, 17794, 2210, 6169, 10102, 21061, 17662, 1468, 12282, 6350, 9035, 1820, 23652, 7301, 8925, 8701, 3533, 9462, 9123, 12788, 17729, 65552, 1261, 21476, 33770, 9380, 2569654, 33556, 53656, 44143, 32612, 10671, 261, 44570, 41922, 2552, 2417, 19319, 43969, 8921, 8993, 955, 32345, 966, 1920, 17318, 1510, 14180, 26005, 554, 16408, 42028, 112091, 13886, 13942, 1673, 54946 or 2419 protein, at a level sufficient to ameliorate cardiovascular disease symptoms may be administered to a patient exhibiting such symptoms. Any of the techniques discussed below may be used for such administration. One of skill in the art will readily know how to determine the concentration of effective, non-toxic doses of the 1722, 10280, 59917, 85553, 10653, 9235, 21668, 17794, 2210, 6169, 10102, 21061, 17662, 1468, 12282, 6350, 9035, 1820, 23652, 7301, 8925, 8701, 3533, 9462, 9123, 12788, 17729, 65552, 1261, 21476, 33770, 9380, 2569654, 33556, 53656, 44143, 32612, 10671, 261, 44570, 41922, 2552, 2417, 19319, 43969, 8921, 8993, 955, 32345, 966, 1920, 17318, 1510, 14180, 26005, 554, 16408, 42028, 112091, 13886, 13942, 1673, 54946 or 2419 protein, utilizing techniques such as those described below.

[0400] Additionally, RNA sequences encoding a 1722, 10280, 59917, 85553, 10653, 9235, 21668, 17794, 2210, 6169, 10102, 21061, 17662, 1468, 12282, 6350, 9035, 1820, 23652, 7301, 8925, 8701, 3533, 9462, 9123, 12788, 17729, 65552, 1261, 21476, 33770, 9380, 2569654, 33556, 53656, 44143, 32612, 10671, 261, 44570, 41922, 2552, 2417, 19319, 43969, 8921, 8993, 955, 32345, 966, 1920, 17318, 1510, 14180, 26005, 554, 16408, 42028, 112091, 13886, 13942, 1673, 54946 or 2419 protein may be directly administered to a patient exhibiting cardiovascular disease symptoms, at a concentration sufficient to produce a level of 1722, 10280, 59917, 85553, 10653, 9235, 21668, 17794, 2210, 6169, 10102, 21061, 17662, 1468, 12282, 6350, 9035, 1820, 23652, 7301, 8925, 8701, 3533, 9462, 9123, 12788, 17729, 65552, 1261, 21476, 33770, 9380, 2569654, 33556, 53656, 44143, 32612, 10671, 261, 44570, 41922, 2552, 2417, 19319, 43969, 8921, 8993, 955, 32345, 966, 1920, 17318, 1510, 14180, 26005, 554, 16408, 42028, 112091, 13886, 13942, 1673, 54946 or 2419 protein such that cardiovascular disease symptoms are ameliorated. Any of the techniques discussed below, which achieve intracellular administration of compounds, such as, for example, liposome administration, may be used for the administration of such RNA molecules. The RNA molecules may be produced, for example, by recombinant techniques such as those described herein.

[0401] Further, subjects may be treated by gene replacement therapy. One or more copies of a 1722, 10280, 59917, 85553, 10653, 9235, 21668, 17794, 2210, 6169, 10102, 21061, 17662, 1468, 12282, 6350, 9035, 1820, 23652, 7301, 8925, 8701, 3533, 9462, 9123, 12788, 17729, 65552, 1261, 21476, 33770, 9380, 2569654, 33556, 53656, 44143, 32612, 10671, 261, 44570, 41922, 2552, 2417, 19319, 43969, 8921, 8993, 955, 32345, 966, 1920, 17318, 1510, 14180, 26005, 554, 16408, 42028, 112091, 13886, 13942, 1673, 54946 or 2419 gene, or a portion thereof, that directs the production of a normal 1722, 10280, 59917, 85553, 10653, 9235, 21668, 17794, 2210, 6169, 10102, 21061, 17662, 1468, 12282, 6350, 9035, 1820, 23652, 7301, 8925, 8701, 3533, 9462, 9123, 12788, 17729, 65552, 1261, 21476, 33770, 9380, 2569654, 33556, 53656, 44143, 32612, 10671, 261, 44570, 41922, 2552, 2417, 19319, 43969, 8921, 8993, 955, 32345, 966, 1920, 17318, 1510, 14180, 26005, 554, 16408, 42028, 112091, 13886, 13942, 1673, 54946 or 2419 protein with 1722, 10280, 59917, 85553, 10653, 9235, 21668, 17794, 2210, 6169, 10102, 21061, 17662, 1468, 12282, 6350, 9035, 1820, 23652, 7301, 8925, 8701, 3533, 9462, 9123, 12788, 17729, 65552, 1261, 21476, 33770, 9380, 2569654, 33556, 53656, 44143, 32612, 10671, 261, 44570, 41922, 2552, 2417, 19319, 43969, 8921, 8993, 955, 32345, 966, 1920, 17318, 1510, 14180, 26005, 554, 16408, 42028, 112091, 13886, 13942, 1673, 54946 or 2419 function, may be inserted into cells using vectors which include, but are not limited to adenovirus, adeno-associated virus, and retrovirus vectors, in addition to other particles that introduce DNA into cells, such as liposomes. Additionally, techniques such as those described above may be used for the introduction of 1722, 10280, 59917, 85553, 10653, 9235, 21668, 17794, 2210, 6169, 10102, 21061, 17662, 1468, 12282, 6350, 9035, 1820, 23652, 7301, 8925, 8701, 3533, 9462, 9123, 12788, 17729, 65552, 1261, 21476, 33770, 9380, 2569654, 33556, 53656, 44143, 32612, 10671, 261, 44570, 41922, 2552, 2417, 19319, 43969, 8921, 8993, 955, 32345, 966, 1920, 17318, 1510, 14180, 26005, 554, 16408, 42028, 112091, 13886, 13942, 1673, 54946 or 2419 gene sequences into human cells.

[0402] Cells, preferably, autologous cells, containing 1722, 10280, 59917, 85553, 10653, 9235, 21668, 17794, 2210, 6169, 10102, 21061, 17662, 1468, 12282, 6350, 9035, 1820, 23652, 7301, 8925, 8701, 3533, 9462, 9123, 12788, 17729, 65552, 1261, 21476, 33770, 9380, 2569654, 33556, 53656, 44143, 32612, 10671, 261, 44570, 41922, 2552, 2417, 19319, 43969, 8921, 8993, 955, 32345, 966, 1920, 17318, 1510, 14180, 26005, 554, 16408, 42028, 112091, 13886, 13942, 1673, 54946 or 2419 expressing gene sequences may then be introduced or reintroduced into the subject at positions which allow for the amelioration of cardiovascular disease symptoms. Such cell replacement techniques may be preferred, for example, when the gene product is a secreted, extracellular gene product.

[0403] C. Pharmaceutical Compositions

[0404] Another aspect of the invention pertains to methods for treating a subject suffering from a cardiovascular disease, e.g., atherosclerosis. These methods involve administering to a subject an agent which modulates 1722, 10280, 59917, 85553, 10653, 92-35, 21668, 17794, 2210, 6169, 10102, 21061, 17662, 1468, 12282, 6350, 9035, 1820, 23652, 7301, 8925, 8701, 3533, 9462, 9123, 12788, 17729, 65552, 1261, 21476, 33770, 9380, 2569654, 33556, 53656, 44143, 32612, 10671, 261, 44570, 41922, 2552, 2417, 19319, 43969, 8921, 8993, 955, 32345, 966, 1920, 17318, 1510, 14180, 26005, 554, 16408, 42028, 112091, 13886, 13942, 1673, 54946 or 2419 expression or activity (e.g., an agent identified by a screening assay described herein), or a combination of such agents. In another embodiment, the method involves administering to a subject a 1722, 10280, 59917, 85553, 10653, 9235, 21668, 17794, 2210, 6169, 10102, 21061, 17662, 1468, 12282, 6350, 9035, 1820, 23652, 7301, 8925, 8701, 3533, 9462, 9123, 12788, 17729, 65552, 1261, 21476, 33770, 9380, 2569654, 33556, 53656, 44143, 32612, 10671, 261, 44570, 41922, 2552, 2417, 19319, 43969, 8921, 8993, 955, 32345, 966, 1920, 17318, 1510, 14180, 26005, 554, 16408, 42028, 112091, 13886, 13942, 1673, 54946 or 2419 protein or nucleic acid molecule as therapy to compensate for reduced, aberrant, or unwanted 1722, 10280, 59917, 85553, 10653, 9235, 21668, 17794, 2210, 6169, 10102, 21061, 17662, 1468, 12282, 6350, 9035, 1820, 23652, 7301, 8925, 8701, 3533, 9462, 9123, 12788, 17729, 65552, 1261, 21476, 33770, 9380, 2569654, 33556, 53656, 44143, 32612, 10671, 261, 44570, 41922, 2552, 2417, 19319, 43969, 8921, 8993, 955, 32345, 966, 1920, 17318, 1510, 14180, 26005, 554, 16408, 42028, 112091, 13886, 13942, 1673, 54946 or 2419 expression or activity.

[0405] Stimulation of 1722, 10280, 59917, 85553, 10653, 9235, 21668, 17794, 2210, 6169, 10102, 21061, 17662, 1468, 12282, 6350, 9035, 1820, 23652, 7301, 8925, 8701, 3533, 9462, 9123, 12788, 17729, 65552, 1261, 21476, 33770, 9380, 2569654, 33556, 53656, 44143, 32612, 10671, 261, 44570, 41922, 2552, 2417, 19319, 43969, 8921, 8993, 955, 32345, 966, 1920, 17318, 1510, 14180, 26005, 554, 16408, 42028, 112091, 13886, 13942, 1673, 54946 or 2419 activity is desirable in situations in which 1722, 10280, 59917, 85553, 10653, 9235, 21668, 17794, 2210, 6169, 10102, 21061, 17662, 1468, 12282, 6350, 9035, 1820, 23652, 7301, 8925, 8701, 3533, 9462, 9123, 12788, 17729, 65552, 1261, 21476, 33770, 9380, 2569654, 33556, 53656, 44143, 32612, 10671, 261, 44570, 41922, 2552, 2417, 19319, 43969, 8921, 8993, 955, 32345, 966, 1920, 17318, 1510, 14180; 26005, 554, 16408, 42028, 112091, 13886, 13942, 1673, 54946 or 2419 is abnormally downregulated and/or in which increased 1722, 10280, 59917, 85553, 10653, 9235, 21668, 17794, 2210, 6169, 10102, 21061, 17662, 1468, 12282, 6350, 9035, 1820, 23652, 7301, 8925, 8701, 3533, 9462, 9123, 12788, 17729, 65552, 1261, 21476, 33770, 9380, 2569654, 33556, 53656, 44143, 32612, 10671, 261, 44570, 41922, 2552, 2417, 19319, 43969, 8921, 8993, 955, 32345, 966, 1920, 17318, 1510, 14180, 26005, 554, 16408, 42028, 112091, 13886, 13942, 1673, 54946 or 2419 activity is likely to have a beneficial effect. Likewise, inhibition of 1722, 10280, 59917, 85553, 10653, 9235, 21668, 17794, 2210, 6169, 10102, 21061, 17662, 1468, 12282, 6350, 9035, 1820, 23652, 7301, 8925, 8701, 3533, 9462, 9123, 12788, 17729, 65552, 1261, 21476, 33770, 9380, 2569654, 33556, 53656, 44143, 32612, 10671, 261, 44570, 41922, 2552, 2417, 19319, 43969, 8921, 8993, 955, 32345, 966, 1920, 17318, 1510, 14180, 26005, 554, 16408, 42028, 112091, 13886, 13942, 1673, 54946 or 2419 activity is desirable in situations in which 1722, 10280, 59917, 85553, 10653, 9235, 21668, 17794, 2210, 6169, 10102, 21061, 17662, 1468, 12282, 6350, 9035, 1820, 23652, 7301, 8925, 8701, 3533, 9462, 9123, 12788, 17729, 65552, 1261, 21476, 33770, 9380, 2569654, 33556, 53656, 44143, 32612, 10671, 261, 44570, 41922, 2552, 2417, 19319, 43969, 8921, 8993, 955, 32345, 966, 1920, 17318, 1510, 14180, 26005, 554, 16408, 42028, 112091, 13886, 13942, 1673, 54946 or 2419 is abnormally upregulated and/or in which decreased 1722, 10280, 59917, 85553, 10653, 9235, 21668, 17794, 2210, 6169, 10102, 21061, 17662, 1468, 12282, 6350, 9035, 1820, 23652, 7301, 8925, 8701, 3533, 9462, 9123, 12788, 17729, 65552, 1261, 21476, 33770, 9380, 2569654, 33556, 53656, 44143, 32612, 10671, 261, 44570, 41922, 2552, 2417, 19319, 43969, 8921, 8993, 955, 32345, 966, 1920, 17318, 1510, 14180, 26005, 554, 16408, 42028, 112091, 13886, 13942, 1673, 54946 or 2419 activity is likely to have a beneficial effect, e.g., inhibition of atherosclerotic lesion formation.

[0406] The agents which modulate 1722, 10280, 59917, 85553, 10653, 9235, 21668, 17794, 2210, 6169, 10102, 21061, 17662, 1468, 12282, 6350, 9035, 1820, 23652, 7301, 8925, 8701, 3533, 9462, 9123, 12788, 17729, 65552, 1261, 21476, 33770, 9380, 2569654, 33556, 53656, 44143, 32612, 10671, 261, 44570, 41922, 2552, 2417, 19319, 43969, 8921, 8993, 955, 32345, 966, 1920, 17318, 1510, 14180, 26005, 554, 16408, 42028, 112091, 13886, 13942, 1673, 54946 or 2419 activity can be administered to a subject using pharmaceutical compositions suitable for such administration. Such compositions typically comprise the agent (e.g., nucleic acid molecule, protein, or antibody) and a pharmaceutically acceptable carrier. As used herein the language “pharmaceutically acceptable carrier” is intended to include any and all solvents, dispersion media, coatings, antibacterial and antifungal agents, isotonic and absorption delaying agents, and the like, compatible with pharmaceutical administration. The use of such media and agents for pharmaceutically active substances is well known in the art. Except insofar as any conventional media or agent is incompatible with the active compound, use thereof in the compositions is contemplated. Supplementary active compounds can also be incorporated into the compositions.

[0407] A pharmaceutical composition used in the therapeutic methods of the invention is formulated to be compatible with its intended route of administration. Examples of routes of administration include parenteral, e.g., intravenous, intradermal, subcutaneous, oral (e.g., inhalation), transdermal (topical), transmucosal, and rectal administration. Solutions or suspensions used for parenteral, intradermal, or subcutaneous application can include the following components: a sterile diluent such as water for injection, saline solution, fixed oils, polyethylene glycols, glycerine, propylene glycol or other synthetic solvents; antibacterial agents such as benzyl alcohol or methyl parabens; antioxidants such as ascorbic acid or sodium bisulfite; chelating agents such as ethylenediaminetetraacetic acid; buffers such as acetates, citrates or phosphates and agents for the adjustment of tonicity such as sodium chloride or dextrose. pH can be adjusted with acids or bases, such as hydrochloric acid or sodium hydroxide. The parenteral preparation can be enclosed in ampoules, disposable syringes or multiple dose vials made of glass or plastic.

[0408] Pharmaceutical compositions suitable for injectable use include sterile aqueous solutions (where water soluble) or dispersions and sterile powders for the extemporaneous preparation of sterile injectable solutions or dispersion. For intravenous administration, suitable carriers include physiological saline, bacteriostatic water, Cremophor EL™ (BASF, Parsippany, N.J.) or phosphate buffered saline (PBS). In all cases, the composition must be sterile and should be fluid to the extent that easy syringability exists. It must be stable under the conditions of manufacture and storage and must be preserved against the contaminating action of microorganisms such as bacteria and fungi. The carrier can be a solvent or dispersion medium containing, for example, water, ethanol, polyol (for example, glycerol, propylene glycol, and liquid polyetheylene glycol, and the like), and suitable mixtures thereof. The proper fluidity can be maintained, for example, by the use of a coating such as lecithin, by the maintenance of the required particle size in the case of dispersion and by the use of surfactants. Prevention of the action of microorganisms can be achieved by various antibacterial and antifungal agents, for example, parabens, chlorobutanol, phenol, ascorbic acid, thimerosal, and the like. In many cases, it will be preferable to include isotonic agents, for example, sugars, polyalcohols such as manitol, sorbitol, and sodium chloride in the composition. Prolonged absorption of the injectable compositions can be brought about by including in the composition an agent which delays absorption, for example, aluminum monostearate and gelatin.

[0409] Sterile injectable solutions can be prepared by incorporating the agent that modulates 1722, 10280, 59917, 85553, 10653, 9235, 21668, 17794, 2210, 6169, 10102, 21061, 17662, 1468, 12282, 6350, 9035, 1820, 23652, 7301, 8925, 8701, 3533, 9462, 9123, 12788, 17729, 65552, 1261, 21476, 33770, 9380, 2569654, 33556, 53656, 44143, 32612, 10671, 261, 44570, 41922, 2552, 2417, 19319, 43969, 8921, 8993, 955, 32345, 966, 1920, 17318, 1510, 14180, 26005, 554, 16408, 42028, 112091, 13886, 13942, 1673, 54946 or 2419 activity (e.g., a fragment of a 1722, 10280, 59917, 85553, 10653, 9235, 21668, 17794, 2210, 6169, 10102, 21061, 17662, 1468, 12282, 6350, 9035, 1820, 23652, 7301, 8925, 8701, 3533, 9462, 9123, 12788, 17729, 65552, 1261, 21476, 33770, 9380, 2569654, 33556, 53656, 44143, 32612, 10671, 261, 44570, 41922, 2552, 2417, 19319, 43969, 8921, 8993, 955, 32345, 966, 1920, 17318, 1510, 14180, 26005, 554, 16408, 42028, 112091, 13886, 13942, 1673, 54946 or 2419 protein or an anti-1722, 10280, 59917, 85553, 10653, 9235, 21668, 17794, 2210, 6169, 10102, 21061, 17662, 1468, 12282, 6350, 9035, 1820, 23652, 7301, 8925, 8701, 3533, 9462, 9123, 12788, 17729, 65552, 1261, 21476, 33770, 9380, 2569654, 33556, 53656, 44143, 32612, 10671, 261, 44570, 41922, 2552, 2417, 19319, 43969, 8921, 8993, 955, 32345, 966, 1920, 17318, 1510, 14180, 26005, 554, 16408, 42028, 112091, 13886, 13942, 1673, 54946 or 2419 antibody) in the required amount in an appropriate solvent with one or a combination of ingredients enumerated above, as required, followed by filtered sterilization. Generally, dispersions are prepared by incorporating the active compound into a sterile vehicle which contains a basic dispersion medium and the required other ingredients from those enumerated above. In the case of sterile powders for the preparation of sterile injectable solutions, the preferred methods of preparation are vacuum drying and freeze-drying which yields a powder of the active ingredient plus any additional desired ingredient from a previously sterile-filtered solution thereof.

[0410] Oral compositions generally include an inert diluent or an edible carrier. They can be enclosed in gelatin capsules or compressed into tablets. For the purpose of oral therapeutic administration, the active compound can be incorporated with excipients and used in the form of tablets, troches, or capsules. Oral compositions can also be prepared using a fluid carrier for use as a mouthwash, wherein the compound in the fluid carrier is applied orally and swished and expectorated or swallowed. Pharmaceutically compatible binding agents, and/or adjuvant materials can be included as part of the composition. The tablets, pills, capsules, troches and the like can contain any of the following ingredients, or compounds of a similar nature: a binder such as microcrystalline cellulose, gum tragacanth or gelatin; an excipient such as starch or lactose, a disintegrating agent such as alginic acid, Primogel, or corn starch; a lubricant such as magnesium stearate or Sterotes; a glidant such as colloidal silicon dioxide; a sweetening agent such as sucrose or saccharin; or a flavoring agent such as peppermint, methyl salicylate, or orange flavoring.

[0411] For administration by inhalation, the compounds are delivered in the form of an aerosol spray from pressured container or dispenser which contains a suitable propellant, e.g., a gas such as carbon dioxide, or a nebulizer.

[0412] Systemic administration can also be by transmucosal or transdermal means. For transmucosal or transdermal administration, penetrants appropriate to the barrier to be permeated are used in the formulation. Such penetrants are generally known in the art, and include, for example, for transmucosal administration, detergents, bile salts, and fusidic acid derivatives. Transmucosal administration can be accomplished through the use of nasal sprays or suppositories. For transdermal administration, the active compounds are formulated into ointments, salves, gels, or creams as generally known in the art.

[0413] The agents that modulate 1722, 10280, 59917, 85553, 10653, 9235, 21668, 17794, 2210, 6169, 10102, 21061, 17662, 1468, 12282, 6350, 9035, 1820, 23652, 7301, 8925, 8701, 3533, 9462, 9123, 12788, 17729, 65552, 1261, 21476, 33770, 9380, 2569654, 33556, 53656, 44143, 32612, 10671, 261, 44570, 41922, 2552, 2417, 19319, 43969, 8921, 8993, 955, 32345, 966, 1920, 17318, 1510, 14180, 26005, 554, 16408, 42028, 112091, 13886, 13942, 1673, 54946 or 2419 activity can also be prepared in the form of suppositories (e.g., with conventional suppository bases such as cocoa butter and other glycerides) or retention enemas for rectal delivery.

[0414] In one embodiment, the agents that modulate 1722, 10280, 59917, 85553, 10653, 9235, 21668, 17794, 2210, 6169, 10102, 21061, 17662, 1468, 12282, 6350, 9035, 1820, 23652, 7301, 8925, 8701, 3533, 9462, 9123, 12788, 17729, 65552, 1261, 21476, 33770, 9380, 2569654, 33556, 53656, 44143, 32612, 10671, 261, 44570, 41922, 2552, 2417, 19319, 43969, 8921, 8993, 955, 32345, 966, 1920, 17318, 1510, 14180, 26005, 554, 16408, 42028, 112091, 13886, 13942, 1673, 54946 or 2419 activity are prepared with carriers that will protect the compound against rapid elimination from the body, such as a controlled release formulation, including implants and microencapsulated delivery systems. Biodegradable, biocompatible polymers can be used, such as ethylene vinyl acetate, polyanhydrides, polyglycolic acid, collagen, polyorthoesters, and polylactic acid. Methods for preparation of such formulations will be apparent to those skilled in the art. The materials can also be obtained commercially from Alza Corporation and Nova Pharmaceuticals, Inc. Liposomal suspensions (including liposomes targeted to infected cells with monoclonal antibodies to viral antigens) can also be used as pharmaceutically acceptable carriers. These can be prepared according to methods known to those skilled in the art, for example, as described in U.S. Pat. No. 4,522,811.

[0415] It is especially advantageous to formulate oral or parenteral compositions in dosage unit form for ease of administration and uniformity of dosage. Dosage unit form as used herein refers to physically discrete units suited as unitary dosages for the subject to be treated; each unit containing a predetermined quantity of active compound calculated to produce the desired therapeutic effect in association with the required pharmaceutical carrier. The specification for the dosage unit forms of the invention are dictated by and directly dependent on the unique characteristics of the agent that modulates 1722, 10280, 59917, 85553, 10653, 9235, 21668, 17794, 2210, 6169, 10102, 21061, 17662, 1468, 12282, 6350, 9035, 1820, 23652, 7301, 8925, 8701, 3533, 9462, 9123, 12788, 17729, 65552, 1261, 21476, 33770, 9380, 2569654, 33556, 53656, 44143, 32612, 10671, 261, 44570, 41922, 2552, 2417, 19319, 43969, 8921, 8993, 955, 32345, 966, 1920, 17318, 1510, 14180, 26005, 554, 16408, 42028, 112091, 13886, 13942, 1673, 54946 or 2419 activity and the particular therapeutic effect to be achieved, and the limitations inherent in the art of compounding such an agent for the treatment of subjects.

[0416] Toxicity and therapeutic efficacy of such agents can be determined by standard pharmaceutical procedures in cell cultures or experimental animals, e.g., for determining the LD50 (the dose lethal to 50% of the population) and the ED50 (the dose therapeutically effective in 50% of the population). The dose ratio between toxic and therapeutic effects is the therapeutic index and can be expressed as the ratio LD50/ED50. Agents which exhibit large therapeutic indices are preferred. While agents that exhibit toxic side effects may be used, care should be taken to design a delivery system that targets such agents to the site of affected tissue in order to minimize potential damage to uninfected cells and, thereby, reduce side effects.

[0417] The data obtained from the cell culture assays and animal studies can be used in formulating a range of dosage for use in humans. The dosage of such 1722, 10280, 59917, 85553, 10653, 9235, 21668, 17794, 2210, 6169, 10102, 21061, 17662, 1468, 12282, 6350, 9035, 1820, 23652, 7301, 8925, 8701, 3533, 9462, 9123, 12788, 17729, 65552, 1261, 21476, 33770, 9380, 2569654, 33556, 53656, 44143, 32612, 10671, 261, 44570, 41922, 2552, 2417, 19319, 43969, 8921, 8993, 955, 32345, 966, 1920, 17318, 1510, 14180, 26005, 554, 16408, 42028, 112091, 13886, 13942, 1673, 54946 or 2419 modulating agents lies preferably within a range of circulating concentrations that include the ED50 with little or no toxicity. The dosage may vary within this range depending upon the dosage form employed and the route of administration utilized. For any agent used in the therapeutic methods of the invention, the therapeutically effective dose can be estimated initially from cell culture assays. A dose may be formulated in animal models to achieve a circulating plasma concentration range that includes the IC50 (i.e., the concentration of the test compound which achieves a half-maximal inhibition of symptoms) as determined in cell culture. Such information can be used to more accurately determine useful doses in humans. Levels in plasma may be measured, for example, by high performance liquid chromatography.

[0418] As defined herein, a therapeutically effective amount of protein or polypeptide (i.e., an effective dosage) ranges from about 0.001 to 30 mg/kg body weight, preferably about 0.01 to 25 mg/kg body weight, more preferably about 0.1 to 20 mg/kg body weight, and even more preferably about 1 to 10 mg/kg, 2 to 9 mg/kg, 3 to 8 mg/kg, 4 to 7 mg/kg, or 5 to 6 mg/kg body weight. The skilled artisan will appreciate that certain factors may influence the dosage required to effectively treat a subject, including but not limited to the severity of the disease or disorder, previous treatments, the general health and/or age of the subject, and other diseases present. Moreover, treatment of a subject with a therapeutically effective amount of a protein, polypeptide, or antibody can include a single treatment or, preferably, can include a series of treatments.

[0419] In a preferred example, a subject is treated with antibody, protein, or polypeptide in the range of between about 0.1 to 20 mg/kg body weight, one time per week for between about 1 to 10 weeks, preferably between 2 to 8 weeks, more preferably between about 3 to 7 weeks, and even more preferably for about 4, 5, or 6 weeks. It will also be appreciated that the effective dosage of antibody, protein, or polypeptide used for treatment may increase or decrease over the course of a particular treatment. Changes in dosage may result and become apparent from the results of diagnostic assays as described herein.

[0420] The present invention encompasses agents which modulate expression or activity. An agent may, for example, be a small molecule. For example, such small molecules include, but are not limited to, peptides, peptidomimetics, amino acids, amino acid analogs, polynucleotides, polynucleotide analogs, nucleotides, nucleotide analogs, organic or inorganic compounds (i.e,. including heteroorganic and organometallic compounds) having a molecular weight less than about 10,000 grams per mole, organic or inorganic compounds having a molecular weight less than about 5,000 grams per mole, organic or inorganic compounds having a molecular weight less than about 1,000 grams per mole, organic or inorganic compounds having a molecular weight less than about 500 grams per mole, and salts, esters, and other pharmaceutically acceptable forms of such compounds. It is understood that appropriate doses of small molecule agents depends upon a number of factors within the ken of the ordinarily skilled physician, veterinarian, or researcher. The dose(s) of the small molecule will vary, for example, depending upon the identity, size, and condition of the subject or sample being treated, further depending upon the route by which the composition is to be administered, if applicable, and the effect which the practitioner desires the small molecule to have upon the nucleic acid or polypeptide of the invention.

[0421] Exemplary doses include milligram or microgram amounts of the small molecule per kilogram of subject or sample weight (e.g., about 1 microgram per kilogram to about 500 milligrams per kilogram, about 100 micrograms per kilogram to about 5 milligrams per kilogram, or about 1 microgram per kilogram to about 50 micrograms per kilogram). It is furthermore understood that appropriate doses of a small molecule depend upon the potency of the small molecule with respect to the expression or activity to be modulated. Such appropriate doses may be determined using the assays described herein. When one or more of these small molecules is to be administered to an animal (e.g., a human) in order to modulate expression or activity of a polypeptide or nucleic acid of the invention, a physician, veterinarian, or researcher may, for example, prescribe a relatively low dose at first, subsequently increasing the dose until an appropriate response is obtained. In addition, it is understood that the specific dose level for any particular animal subject will depend upon a variety of factors including the activity of the specific compound employed, the age, body weight, general health, gender, and diet of the subject, the time of administration, the route of administration, the rate of excretion, any drug combination, and the degree of expression or activity to be modulated.

[0422] Further, an antibody (or fragment thereof) may be conjugated to a therapeutic moiety such as a cytotoxin, a therapeutic agent or a radioactive metal ion. A cytotoxin or cytotoxic agent includes any agent that is detrimental to cells. Examples include taxol, cytochalasin B, gramicidin D, ethidium bromide, emetine, mitomycin, etoposide, tenoposide, vincristine, vinblastine, colchicin, doxorubicin, daunorubicin, dihydroxy anthracin dione, mitoxantrone, mithramycin, actinomycin D, 1-dehydrotestosterone, glucocorticoids, procaine, tetracaine, lidocaine, propranolol, and puromycin and analogs or homologs thereof. Therapeutic agents include, but are not limited to, antimetabolites (e.g., methotrexate, 6-mercaptopurine, 6-thioguanine, cytarabine, 5-fluorouracil decarbazine), alkylating agents (e.g., mechlorethamine, thioepa chlorambucil, melphalan, carmustine (BSNU) and lomustine (CCNU), cyclothosphamide, busulfan, dibromomannitol, streptozotocin, mitomycin C, and cis-dichlorodiamine platinum (II) (DDP) cisplatin), anthracyclines (e.g., daunorubicin (formerly daunomycin) and doxorubicin), antibiotics (e.g., dactinomycin (formerly actinomycin), bleomycin, mithramycin, and anthramycin (AMC)), and anti-mitotic agents (e.g., vincristine and vinblastine).

[0423] The conjugates of the invention can be used for modifying a given biological response, the drug moiety is not to be construed as limited to classical chemical therapeutic agents. For example, the drug moiety may be a protein or polypeptide possessing a desired biological activity. Such proteins may include, for example, a toxin such as abrin, ricin A, pseudomonas exotoxin, or diphtheria toxin; a protein such as tumor necrosis factor, alpha-interferon, beta-interferon, nerve growth factor, platelet derived growth factor, tissue plasminogen activator; or biological response modifiers such as, for example, lymphokines, interleukin-1 (“IL-1”), interleukin-2 (“IL-2”), interleukin-6 (“IL-6”), granulocyte macrophase colony stimulating factor (“GM-CSF”), granulocyte colony stimulating factor (“G-CSF”), or other growth factors.

[0424] Techniques for conjugating such therapeutic moiety to antibodies are well known, see, e.g., Arnon et al., “Monoclonal Antibodies For immunotargeting Of Drugs In Cancer Therapy”, in Monoclonal Antibodies And Cancer Therapy, Reisfeld et al. (eds.), pp. 243-56 (Alan R. Liss, Inc. 1985); Hellstrom et al., “Antibodies For Drug Delivery”, in Controlled Drug Delivery (2nd Ed.), Robinson et al. (eds.), pp. 623-53 (Marcel Dekker, Inc. 1987); Thorpe, “Antibody Carriers Of Cytotoxic Agents In Cancer Therapy: A Review”, in Monoclonal Antibodies '84: Biological And Clinical Applications, Pinchera et al. (eds.), pp. 475-506 (1985); “Analysis, Results, And Future Prospective Of The Therapeutic Use Of Radiolabeled Antibody In Cancer Therapy”, in Monoclonal Antibodies For Cancer Detection And Therapy, Baldwin et al. (eds.), pp. 303-16 (Academic Press 1985), and Thorpe et al., “The Preparation And Cytotoxic Properties Of Antibody-Toxin Conjugates”, Immunol. Rev., 62:119-58 (1982). Alternatively, an antibody can be conjugated to a second antibody to form an antibody heteroconjugate as described by Segal in U.S. Pat. No. 4,676,980.

[0425] The nucleic acid molecules used in the methods of the invention can be inserted into vectors and used as gene therapy vectors. Gene therapy vectors can be delivered to a subject by, for example, intravenous injection, local administration (see U.S. Pat. No. 5,328,470) or by stereotactic injection (see, e.g., Chen et al. (1994) Proc. Natl. Acad. Sci. USA 91:3054-3057). The pharmaceutical preparation of the gene therapy vector can include the gene therapy vector in an acceptable diluent, or can comprise a slow release matrix in which the gene delivery vehicle is imbedded. Alternatively, where the complete gene delivery vector can be produced intact from recombinant cells, e.g., retroviral vectors, the pharmaceutical preparation can include one or more cells which produce the gene delivery system.

[0426] D. Pharmacogenomics

[0427] In conjunction with the therapeutic methods of the invention, pharmacogenomics (i.e., the study of the relationship between a subject's genotype and that subject's response to a foreign compound or drug) may be considered. Differences in metabolism of therapeutics can lead to severe toxicity or therapeutic failure by altering the relation between dose and blood concentration of the pharmacologically active drug. Thus, a physician or clinician may consider applying knowledge obtained in relevant pharmacogenomics studies in determining whether to administer an agent which modulates 1722, 10280, 59917, 85553, 10653, 9235, 21668, 17794, 2210, 6169, 10102, 21061, 17662, 1468, 12282, 6350, 9035, 1820, 23652, 7301, 8925, 8701, 3533, 9462, 9123, 12788, 17729, 65552, 1261, 21476, 33770, 9380, 2569654, 33556, 53656, 44143, 32612, 10671, 261, 44570, 41922, 2552, 2417, 19319, 43969, 8921, 8993, 955, 32345, 966, 1920, 17318, 1510, 14180, 26005, 554, 16408, 42028, 112091, 13886, 13942, 1673, 54946 or 2419 activity, as well as tailoring the dosage and/or therapeutic regimen of treatment with an agent which modulates 1722, 10280, 59917, 85553, 10653, 9235, 21668, 17794, 2210, 6169, 10102, 21061, 17662, 1468, 12282, 6350, 9035, 1820, 23652, 7301, 8925, 8701, 3533, 9462, 9123, 12788, 17729, 65552, 1261, 21476, 33770, 9380, 2569654, 33556, 53656, 44143, 32612, 10671, 261, 44570, 41922, 2552, 2417, 19319, 43969, 8921, 8993, 955, 32345, 966, 1920, 17318, 1510, 14180, 26005, 554, 16408, 42028, 112091, 13886, 13942, 1673, 54946 or 2419 activity.

[0428] Pharmacogenomics deals with clinically significant hereditary variations in the response to drugs due to altered drug disposition and abnormal action in affected persons. See, for example, Eichelbaum, M. et al. (1996) Clin. Exp. Pharmacol. Physiol. 23(10-11): 983-985 and Linder, M. W. et al. (1997) Clin. Chem. 43(2):254-266. In general, two types of pharmacogenetic conditions can be differentiated. Genetic conditions transmitted as a single factor altering the way drugs act on the body (altered drug action) or genetic conditions transmitted as single factors altering the way the body acts on drugs (altered drug metabolism). These pharmacogenetic conditions can occur either as rare genetic defects or as naturally-occurring polymorphisms. For example, glucose-6-phosphate aminopeptidase deficiency (G6PD) is a common inherited enzymopathy in which the main clinical complication is haemolysis after ingestion of oxidant drugs (anti-malarials, sulfonamides, analgesics, nitrofurans) and consumption of fava beans.

[0429] One pharmacogenomics approach to identifying genes that predict drug response, known as “a genome-wide association”, relies primarily on a high-resolution map of the human genome consisting of already known gene-related markers (e.g., a “bi-allelic” gene marker map which consists of 60,000-100,000 polymorphic or variable sites on the human genome, each of which has two variants). Such a high-resolution genetic map can be compared to a map of the genome of each of a statistically significant number of patients taking part in a Phase II/III drug trial to identify markers associated with a particular observed drug response or side effect. Alternatively, such a high resolution map can be generated from a combination of some ten million known single nucleotide polymorphisms (SNPs) in the human genome. As used herein, a “SNP” is a common alteration that occurs in a single nucleotide base in a stretch of DNA. For example, a SNP may occur once per every 1000 bases of DNA. A SNP may be involved in a disease process, however, the vast majority may not be disease-associated. Given a genetic map based on the occurrence of such SNPs, individuals can be grouped into genetic categories depending on a particular pattern of SNPs in their individual genome. In such a manner, treatment regimens can be tailored to groups of genetically similar individuals, taking into account traits that may be common among such genetically similar individuals.

[0430] Alternatively, a method termed the “candidate gene approach” can be utilized to identify genes that predict drug response. According to this method, if a gene that encodes a drug target is known (e.g., a 1722, 10280, 59917, 85553, 10653, 9235, 21668, 17794, 2210, 6169, 10102, 21061, 17662, 1468, 12282, 6350, 9035, 1820, 23652, 7301, 8925, 8701, 3533, 9462, 9123, 12788, 17729, 65552, 1261, 21476, 33770, 9380, 2569654, 33556, 53656, 44143, 32612, 10671, 261, 44570, 41922, 2552, 2417, 19319, 43969, 8921, 8993, 955, 32345, 966, 1920, 17318, 1510, 14180, 26005, 554, 16408, 42028, 112091, 13886, 13942, 1673, 54946 or 2419 protein used in the methods of the present invention), all common variants of that gene can be fairly easily identified in the population and it can be determined if having one version of the gene versus another is associated with a particular drug response.

[0431] As an illustrative embodiment, the activity of drug metabolizing enzymes is a major determinant of both the intensity and duration of drug action. The discovery of genetic polymorphisms of drug metabolizing enzymes (e.g., N-acetyltransferase 2 (NAT 2) and the cytochrome P450 enzymes CYP2D6 and CYP2C19) has provided an explanation as to why some patients do not obtain the expected drug effects or show exaggerated drug response and serious toxicity after taking the standard and safe dose of a drug. These polymorphisms are expressed in two phenotypes in the population, the extensive metabolizer (EM) and poor metabolizer (PM). The prevalence of PM is different among different populations. For example, the gene coding for CYP2D6 is highly polymorphic and several mutations have been identified in PM, which all lead to the absence of functional CYP2D6. Poor metabolizers of CYP2D6 and CYP2C19 quite frequently experience exaggerated drug response and side effects when they receive standard doses. If a metabolite is the active therapeutic moiety, PM show no therapeutic response, as demonstrated for the analgesic effect of codeine mediated by its CYP2D6-formed metabolite morphine. The other extreme are the so called ultra-rapid metabolizers who do not respond to standard doses. Recently, the molecular basis of ultra-rapid metabolism has been identified to be due to CYP2D6 gene amplification.

[0432] Alternatively, a method termed the “gene expression profiling” can be utilized to identify genes that predict drug response. For example, the gene expression of an animal dosed with a drug (e.g., a 1722, 10280, 59917, 85553, 10653, 9235, 21668, 17794, 2210, 6169, 10102, 21061, 17662, 1468, 12282, 6350, 9035, 1820, 23652, 7301, 8925, 8701, 3533, 9462, 9123, 12788, 17729, 65552, 1261, 21476, 33770, 9380, 2569654, 33556, 53656, 44143, 32612, 10671, 261, 44570, 41922, 2552, 2417, 19319, 43969, 8921, 8993, 955, 32345, 966, 1920, 17318, 1510, 14180, 26005, 554, 16408, 42028, 112091, 13886, 13942, 1673, 54946 or 2419 molecule or 1722, 10280, 59917, 85553, 10653, 9235, 21668, 17794, 2210, 6169, 10102, 21061, 17662, 1468, 12282, 6350, 9035, 1820, 23652, 7301, 8925, 8701, 3533, 9462, 9123, 12788, 17729, 65552, 1261, 21476, 33770, 9380, 2569654, 33556, 53656, 44143, 32612, 10671, 261, 44570, 41922, 2552, 2417, 19319, 43969, 8921, 8993, 955, 32345, 966, 1920, 17318, 1510, 14180, 26005, 554, 16408, 42028, 112091, 13886, 13942, 1673, 54946 or 2419 modulator used in the methods of the present invention) can give an indication whether gene pathways related to toxicity have been turned on.

[0433] Information generated from more than one of the above pharmacogenomics approaches can be used to determine appropriate dosage and treatment regimens for prophylactic or therapeutic treatment of a subject. This knowledge, when applied to dosing or drug selection, can avoid adverse reactions or therapeutic failure and, thus, enhance therapeutic or prophylactic efficiency when treating a subject suffering from a cardiovascular disease, e.g., atherosclerosis, with an agent which modulates 1722, 10280, 59917, 85553, 10653, 9235, 21668, 17794, 2210, 6169, 10102, 21061, 17662, 1468, 12282, 6350, 9035, 1820, 23652, 7301, 8925, 8701, 3533, 9462, 9123, 12788, 17729, 65552, 1261, 21476, 33770, 9380, 2569654, 33556, 53656, 44143, 32612, 10671, 261, 44570, 41922, 2552, 2417, 19319, 43969, 8921, 8993, 955, 32345, 966, 1920, 17318, 1510, 14180, 26005, 554, 16408, 42028, 112091, 13886, 13942, 1673, 54946 or 2419 activity.

[0434] V. Recombinant Expression Vectors and Host Cells Used in the Methods of the Invention

[0435] The methods of the invention (e.g., the screening assays described herein) include the use of vectors, preferably expression vectors, containing a nucleic acid encoding a 1722, 10280, 59917, 85553, 10653, 9235, 21668, 17794, 2210, 6169, 10102, 21061, 17662, 1468, 12282, 6350, 9035, 1820, 23652, 7301, 8925, 8701, 3533, 9462, 9123, 12788, 17729, 65552, 1261, 21476, 33770, 9380, 2569654, 33556, 53656, 44143, 32612, 10671, 261, 44570, 41922, 2552, 2417, 19319, 43969, 8921, 8993, 955, 32345, 966, 1920, 17318, 1510, 14180, 26005, 554, 16408, 42028, 112091, 13886, 13942, 1673, 54946 or 2419 protein (or a portion thereof). As used herein, the term “vector” refers to a nucleic acid molecule capable of transporting another nucleic acid to which it has been linked. One type of vector is a “plasmid”, which refers to a circular double stranded DNA loop into which additional DNA segments can be ligated. Another type of vector is a viral vector, wherein additional DNA segments can be ligated into the viral genome. Certain vectors are capable of autonomous replication in a host cell into which they are introduced (e.g., bacterial vectors having a bacterial origin of replication and episomal mammalian vectors). Other vectors (e.g., non-episomal mammalian vectors) are integrated into the genome of a host cell upon introduction into the host cell, and thereby are replicated along with the host genome. Moreover, certain vectors are capable of directing the expression of genes to which they are operatively linked. Such vectors are referred to herein as “expression vectors”. In general, expression vectors of utility in recombinant DNA techniques are often in the form of plasmids. In the present specification, “plasmid” and “vector” can be used interchangeably as the plasmid is the most commonly used form of vector. However, the invention is intended to include such other forms of expression vectors, such as viral vectors (e.g., replication defective retroviruses, adenoviruses and adeno-associated viruses), which serve equivalent functions.

[0436] The recombinant expression vectors to be used in the methods of the invention comprise a nucleic acid of the invention in a form suitable for expression of the nucleic acid in a host cell, which means that the recombinant expression vectors include one or more regulatory sequences, selected on the basis of the host cells to be used for expression, which is operatively linked to the nucleic acid sequence to be expressed. Within a recombinant expression vector, “operably linked” is intended to mean that the nucleotide sequence of interest is linked to the regulatory sequence(s) in a manner which allows for expression of the nucleotide sequence (e.g., in an in vitro transcription/translation system or in a host cell when the vector is introduced into the host cell). The term “regulatory sequence” is intended to include promoters, enhancers and other expression control elements (e.g., polyadenylation signals). Such regulatory sequences are described, for example, in Goeddel (1990) Methods Enzymol. 185:3-7. Regulatory sequences include those which direct constitutive expression of a nucleotide sequence in many types of host cells and those which direct expression of the nucleotide sequence only in certain host cells (e.g., tissue-specific regulatory sequences). It will be appreciated by those skilled in the art that the design of the expression vector can depend on such factors as the choice of the host cell to be transformed, the level of expression of protein desired, and the like. The expression vectors of the invention can be introduced into host cells to thereby produce proteins or peptides, including fusion proteins or peptides, encoded by nucleic acids as described herein (e.g., 1722, 10280, 59917, 85553, 10653, 9235, 21668, 17794, 2210, 6169, 10102, 21061, 17662, 1468, 12282, 6350, 9035, 1820, 23652, 7301, 8925, 8701, 3533, 9462, 9123, 12788, 17729, 65552, 1261, 21476, 33770, 9380, 2569654, 33556, 53656, 44143, 32612, 10671, 261, 44570, 41922, 2552, 2417, 19319, 43969, 8921, 8993, 955, 32345, 966, 1920, 17318, 1510, 14180, 26005, 554, 16408, 42028, 112091, 13886, 13942, 1673, 54946 or 2419 proteins, mutant forms of 1722, 10280, 59917, 85553, 10653, 9235, 21668, 17794, 2210, 6169, 10102, 21061, 17662, 1468, 12282, 6350, 9035, 1820, 23652, 7301, 8925, 8701, 3533, 9462, 9123, 12788, 17729, 65552, 1261, 21476, 33770, 9380, 2569654, 33556, 53656, 44143, 32612, 10671, 261, 44570, 41922, 2552, 2417, 19319, 43969, 8921, 8993, 955, 32345, 966, 1920, 17318, 1510, 14180, 26005, 554, 16408, 42028, 112091, 13886, 13942, 1673, 54946 or 2419 proteins, fusion proteins, and the like).

[0437] The recombinant expression vectors to be used in the methods of the invention can be designed for expression of 1722, 10280, 59917, 85553, 10653, 9235, 21668, 17794, 2210, 6169, 10102, 21061, 17662, 1468, 12282, 6350, 9035, 1820, 23652, 7301, 8925, 8701, 3533, 9462, 9123, 12788, 17729, 65552, 1261, 21476, 33770, 9380, 2569654, 33556, 53656, 44143, 32612, 10671, 261, 44570, 41922, 2552, 2417, 19319, 43969, 8921, 8993, 955, 32345, 966, 1920, 17318, 1510, 14180, 26005, 554, 16408, 42028, 112091, 13886, 13942, 1673, 54946 or 2419 proteins in prokaryotic or eukaryotic cells. For example, 1722, 10280, 59917, 85553, 10653, 9235, 21668, 17794, 2210, 6169, 10102, 21061, 17662, 1468, 12282, 6350, 9035, 1820, 23652, 7301, 8925, 8701, 3533, 9462, 9123, 12788, 17729, 65552, 1261, 21476, 33770, 9380, 2569654, 33556, 53656, 44143, 32612, 10671, 261, 44570, 41922, 2552, 2417, 19319, 43969, 8921, 8993, 955, 32345, 966, 1920, 17318, 1510, 14180, 26005, 554, 16408, 42028, 112091, 13886, 13942, 1673, 54946 or 2419 proteins can be expressed in bacterial cells such as E. coli, insect cells (using baculovirus expression vectors), yeast cells, or mammalian cells. Suitable host cells are discussed further in Goeddel (1990) supra. Alternatively, the recombinant expression vector can be transcribed and translated in vitro, for example using T7 promoter regulatory sequences and T7 polymerase.

[0438] Expression of proteins in prokaryotes is most often carried out in E. coli with vectors containing constitutive or inducible promoters directing the expression of either fusion or non-fusion proteins. Fusion vectors add a number of amino acids to a protein encoded therein, usually to the amino terminus of the recombinant protein. Such fusion vectors typically serve three purposes: 1) to increase expression of recombinant protein; 2) to increase the solubility of the recombinant protein; and 3) to aid in the purification of the recombinant protein by acting as a ligand in affinity purification. Often, in fusion expression vectors, a proteolytic cleavage site is introduced at the junction of the fusion moiety and the recombinant protein to enable separation of the recombinant protein from the fusion moiety subsequent to purification of the fusion protein. Such enzymes, and their cognate recognition sequences, include Factor Xa, thrombin and enterokinase. Typical fusion expression vectors include pGEX (Pharmacia Biotech Inc; Smith, D. B. and Johnson, K. S. (1988) Gene 67:31-40), pMAL (New England Biolabs, Beverly, Mass.) and pRIT5 (Pharmacia, Piscataway, N.J.) which fuse glutathione S-transferase (GST), maltose E binding protein, or protein A, respectively, to the target recombinant protein.

[0439] Purified fusion proteins can be utilized in 1722, 10280, 59917, 85553, 10653, 9235, 21668, 17794, 2210, 6169, 10102, 21061, 17662, 1468, 12282, 6350, 9035, 1820, 23652, 7301, 8925, 8701, 3533, 9462, 9123, 12788, 17729, 65552, 1261, 21476, 33770, 9380, 2569654, 33556, 53656, 44143, 32612, 10671, 261, 44570, 41922, 2552, 2417, 19319, 43969, 8921, 8993, 955, 32345, 966, 1920, 17318, 1510, 14180, 26005, 554, 16408, 42028, 112091, 13886, 13942, 1673, 54946 or 2419 activity assays, (e.g., direct assays or competitive assays described in detail below), or to generate antibodies specific for 1722, 10280, 59917, 85553, 10653, 9235, 21668, 17794, 2210, 6169, 10102, 21061, 17662, 1468, 12282, 6350, 9035, 1820, 23652, 7301, 8925, 8701, 3533, 9462, 9123, 12788, 17729, 65552, 1261, 21476, 33770, 9380, 2569654, 33556, 53656, 44143, 32612, 10671, 261, 44570, 41922, 2552, 2417, 19319, 43969, 8921, 8993, 955, 32345, 966, 1920, 17318, 1510, 14180, 26005, 554, 16408, 42028, 112091, 13886, 13942, 1673, 54946 or 2419 proteins. In a preferred embodiment, a 1722, 10280, 59917, 85553, 10653, 9235, 21668, 17794, 2210, 6169, 10102, 21061, 17662, 1468, 12282, 6350, 9035, 1820, 23652, 7301, 8925, 8701, 3533, 9462, 9123, 12788, 17729, 65552, 1261, 21476, 33770, 9380, 2569654, 33556, 53656, 44143, 32612, 10671, 261, 44570, 41922, 2552, 2417, 19319, 43969, 8921, 8993, 955, 32345, 966, 1920, 17318, 1510, 14180, 26005, 554, 16408, 42028, 112091, 13886, 13942, 1673, 54946 or 2419 fusion protein expressed in a retroviral expression vector of the present invention can be utilized to infect bone marrow cells which are subsequently transplanted into irradiated recipients. The pathology of the subject recipient is then examined after sufficient time has passed (e.g., six weeks).

[0440] In another embodiment, a nucleic acid of the invention is expressed in mammalian cells using a mammalian expression vector. Examples of mammalian expression vectors include pCDM8 (Seed, B. (1987) Nature 329:840) and pMT2PC (Kaufman et al. (1987) EMBO J. 6:187-195). When used in mammalian cells, the expression vector's control functions are often provided by viral regulatory elements. For example, commonly used promoters are derived from polyoma, Adenovirus 2, cytomegalovirus and Simian Virus 40. For other suitable expression systems for both prokaryotic and eukaryotic cells see chapters 16 and 17 of Sambrook, J. et al., Molecular Cloning: A Laboratory Manual. 2nd ed., Cold Spring Harbor Laboratory, Cold Spring Harbor Laboratory Press, Cold Spring Harbor, N.Y., 1989.

[0441] In another embodiment, the recombinant mammalian expression vector is capable of directing expression of the nucleic acid preferentially in a particular cell type (e.g., tissue-specific regulatory elements are used to express the nucleic acid).

[0442] The methods of the invention may further use a recombinant expression vector comprising a DNA molecule of the invention cloned into the expression vector in an antisense orientation. That is, the DNA molecule is operatively linked to a regulatory sequence in a manner which allows for expression (by transcription of the DNA molecule) of an RNA molecule which is antisense to 1722, 10280, 59917, 85553, 10653, 9235, 21668, 17794, 2210, 6169, 10102, 21061, 17662, 1468, 12282, 6350, 9035, 1820, 23652, 7301, 8925, 8701, 3533, 9462, 9123, 12788, 17729, 65552, 1261, 21476, 33770, 9380, 2569654, 33556, 53656, 44143, 32612, 10671, 261, 44570, 41922, 2552, 2417, 19319, 43969, 8921, 8993, 955, 32345, 966, 1920, 17318, 1510, 14180, 26005, 554, 16408, 42028, 112091, 13886, 13942, 1673, 54946 or 2419 mRNA. Regulatory sequences operatively linked to a nucleic acid cloned in the antisense orientation can be chosen which direct the continuous expression of the antisense RNA molecule in a variety of cell types, for instance viral promoters and/or enhancers, or regulatory sequences can be chosen which direct constitutive, tissue specific, or cell type specific expression of antisense RNA. The antisense expression vector can be in the form of a recombinant plasmid, phagemid, or attenuated virus in which antisense nucleic acids are produced under the control of a high efficiency regulatory region, the activity of which can be determined by the cell type into which the vector is introduced. For a discussion of the regulation of gene expression using antisense genes, see Weintraub, H. et al., Antisense RNA as a molecular tool for genetic analysis, Reviews-Trends in Genetics, Vol. 1(1) 1986.

[0443] Another aspect of the invention pertains to the use of host cells into which a 1722, 10280, 59917, 85553, 10653, 9235, 21668, 17794, 2210, 6169, 10102, 21061, 17662, 1468, 12282, 6350, 9035, 1820, 23652, 7301, 8925, 8701, 3533, 9462, 9123, 12788, 17729, 65552, 1261, 21476, 33770, 9380, 2569654, 33556, 53656, 44143, 32612, 10671, 261, 44570, 41922, 2552, 2417, 19319, 43969, 8921, 8993, 955, 32345, 966, 1920, 17318, 1510, 14180, 26005, 554, 16408, 42028, 112091, 13886, 13942, 1673, 54946 or 2419 nucleic acid molecule of the invention is introduced, e.g., a 1722, 10280, 59917, 85553, 10653, 9235, 21668, 17794, 2210, 6169, 10102, 21061, 17662, 1468, 12282, 6350, 9035, 1820, 23652, 7301, 8925, 8701, 3533, 9462, 9123, 12788, 17729, 65552, 1261, 21476, 33770, 9380, 2569654, 33556, 53656, 44143, 32612, 10671, 261, 44570, 41922, 2552, 2417, 19319, 43969, 8921, 8993, 955, 32345, 966, 1920, 17318, 1510, 14180, 26005, 554, 16408, 42028, 112091, 13886, 13942, 1673, 54946 or 2419 nucleic acid molecule within a recombinant expression vector or a 1722, 10280, 59917, 85553, 10653, 9235, 21668, 17794, 2210, 6169, 10102, 21061, 17662, 1468, 12282, 6350, 9035, 1820, 23652, 7301, 8925, 8701, 3533, 9462, 9123, 12788, 17729, 65552, 1261, 21476, 33770, 9380, 2569654, 33556, 53656, 44143, 32612, 10671, 261, 44570, 41922, 2552, 2417, 19319, 43969, 8921, 8993, 955, 32345, 966, 1920, 17318, 1510, 14180, 26005, 554, 16408, 42028, 112091, 13886, 13942, 1673, 54946 or 2419 nucleic acid molecule containing sequences which allow it to homologously recombine into a specific site of the host cell's genome. The terms “host cell” and “recombinant host cell” are used interchangeably herein. It is understood that such terms refer not only to the particular subject cell but to the progeny or potential progeny of such a cell. Because certain modifications may occur in succeeding generations due to either mutation or environmental influences, such progeny may not, in fact, be identical to the parent cell, but are still included within the scope of the term as used herein.

[0444] A host cell can be any prokaryotic or eukaryotic cell. For example, a 1722, 10280, 59917, 85553, 10653, 9235, 21668, 17794, 2210, 6169, 10102, 21061, 17662, 1468, 12282, 6350, 9035, 1820, 23652, 7301, 8925, 8701, 3533, 9462, 9123, 12788, 17729, 65552, 1261, 21476, 33770, 9380, 2569654, 33556, 53656, 44143, 32612, 10671, 261, 44570, 41922, 2552, 2417, 19319, 43969, 8921, 8993, 955, 32345, 966, 1920, 17318, 1510, 14180, 26005, 554, 16408, 42028, 112091, 13886, 13942, 1673, 54946 or 2419 protein can be expressed in bacterial cells such as E. coli, insect cells, yeast or mammalian cells (such as Chinese hamster ovary cells (CHO) or COS cells). Other suitable host cells are known to those skilled in the art.

[0445] Vector DNA can be introduced into prokaryotic or eukaryotic cells via conventional transformation or transfection techniques. As used herein, the terms “transformation” and “transfection” are intended to refer to a variety of art-recognized techniques for introducing foreign nucleic acid (e.g., DNA) into a host cell, including calcium phosphate or calcium chloride co-precipitation, DEAE-dextran-mediated transfection, lipofection, or electroporation. Suitable methods for transforming or transfecting host cells can be found in Sambrook et al. (Molecular Cloning: A Laboratory Manual. 2nd, ed., Cold Spring Harbor Laboratory, Cold Spring Harbor Laboratory Press, Cold Spring Harbor, N.Y., 1989), and other laboratory manuals.

[0446] A host cell used in the methods of the invention, such as a prokaryotic or eukaryotic host cell in culture, can be used to produce (i.e., express) a 1722, 10280, 59917, 85553, 10653, 9235, 21668, 17794, 2210, 6169, 10102, 21061, 17662, 1468, 12282, 6350, 9035, 1820, 23652, 7301, 8925, 8701, 3533, 9462, 9123, 12788, 17729, 65552, 1261, 21476, 33770, 9380, 2569654, 33556, 53656, 44143, 32612, 10671, 261, 44570, 41922, 2552, 2417, 19319, 43969, 8921, 8993, 955, 32345, 966, 1920, 17318, 1510, 14180, 26005, 554, 16408, 42028, 112091, 13886, 13942, 1673, 54946 or 2419 protein. Accordingly, the invention further provides methods for producing a 1722, 10280, 59917, 85553, 10653, 9235, 21668, 17794, 2210, 6169, 10102, 21061, 17662, 1468, 12282, 6350, 9035, 1820, 23652, 7301, 8925, 8701, 3533, 9462, 9123, 12788, 17729, 65552, 1261, 21476, 33770, 9380, 2569654, 33556, 53656, 44143, 32612, 10671, 261, 44570, 41922, 2552, 2417, 19319, 43969, 8921, 8993, 955, 32345, 966, 1920, 17318, 1510, 14180, 26005, 554, 16408, 42028, 112091, 13886, 13942, 1673, 54946 or 2419 protein using the host cells of the invention. In one embodiment, the method comprises culturing the host cell of the invention (into which a recombinant expression vector encoding a 1722, 10280, 59917, 85553, 10653, 9235, 21668, 17794, 2210, 6169, 10102, 21061, 17662, 1468, 12282, 6350, 9035, 1820, 23652, 7301, 8925, 8701, 3533, 9462, 9123, 12788, 17729, 65552, 1261, 21476, 33770, 9380, 2569654, 33556, 53656, 44143, 32612, 10671, 261, 44570, 41922, 2552, 2417, 19319, 43969, 8921, 8993, 955, 32345, 966, 1920, 17318, 1510, 14180, 26005, 554, 16408, 42028, 112091, 13886, 13942, 1673, 54946 or 2419 protein has been introduced) in a suitable medium such that a 1722, 10280, 59917, 85553, 10653, 9235, 21668, 17794, 2210, 6169, 10102, 21061, 17662, 1468, 12282, 6350, 9035, 1820, 23652, 7301, 8925, 8701, 3533, 9462, 9123, 12788, 17729, 65552, 1261, 21476, 33770, 9380, 2569654, 33556, 53656, 44143, 32612, 10671, 261, 44570, 41922, 2552, 2417, 19319, 43969, 8921, 8993, 955, 32345, 966, 1920, 17318, 1510, 14180, 26005, 554, 16408, 42028, 112091, 13886, 13942, 1673, 54946 or 2419 protein is produced. In another embodiment, the method further comprises isolating a 1722, 10280, 59917, 85553, 10653, 9235, 21668, 17794, 2210, 6169, 10102, 21061, 17662, 1468, 12282, 6350, 9035, 1820, 23652, 7301, 8925, 8701, 3533, 9462, 9123, 12788, 17729, 65552, 1261, 21476, 33770, 9380, 2569654, 33556, 53656, 44143, 32612, 10671, 261, 44570, 41922, 2552, 2417, 19319, 43969, 8921, 8993, 955, 32345, 966, 1920, 17318, 1510, 14180, 26005, 554, 16408, 42028, 112091, 13886, 13942, 1673, 54946 or 2419 protein from the medium or the host cell.

[0447] VI. Isolated Nucleic Acid Molecules Used in the Methods of the Invention

[0448] The methods of the invention include the use of isolated nucleic acid molecules that encode 1722, 10280, 59917, 85553, 10653, 9235, 21668, 17794, 2210, 6169, 10102, 21061, 17662, 1468, 12282, 6350, 9035, 1820, 23652, 7301, 8925, 8701, 3533, 9462, 9123, 12788, 17729, 65552, 1261, 21476, 33770, 9380, 2569654, 33556, 53656, 44143, 32612, 10671, 261, 44570, 41922, 2552, 2417, 19319, 43969, 8921, 8993, 955, 32345, 966, 1920, 17318, 1510, 14180, 26005, 554, 16408, 42028, 112091, 13886, 13942, 1673, 54946 or 2419 proteins or biologically active portions thereof, as well as nucleic acid fragments sufficient for use as hybridization probes to identify 1722, 10280, 59917, 85553, 10653, 9235, 21668, 17794, 2210, 6169, 10102, 21061, 17662, 1468, 12282, 6350, 9035, 1820, 23652, 7301, 8925, 8701, 3533, 9462, 9123, 12788, 17729, 65552, 1261, 21476, 33770, 9380, 2569654, 33556, 53656, 44143, 32612, 10671, 261, 44570, 41922, 2552, 2417, 19319, 43969, 8921, 8993, 955, 32345, 966, 1920, 17318, 1510, 14180, 26005, 554, 16408, 42028, 112091, 13886, 13942, 1673, 54946 or 2419-encoding nucleic acid molecules (e.g., 1722, 10280, 59917, 85553, 10653, 9235, 21668, 17794, 2210, 6169, 10102, 21061, 17662, 1468, 12282, 6350, 9035, 1820, 23652, 7301, 8925, 8701, 3533, 9462, 9123, 12788, 17729, 65552, 1261, 21476, 33770, 9380, 2569654, 33556, 53656, 44143, 32612, 10671, 261, 44570, 41922, 2552, 2417, 19319, 43969, 8921, 8993, 955, 32345, 966, 1920, 17318, 1510, 14180, 26005, 554, 16408, 42028, 112091, 13886, 13942, 1673, 54946 or 2419 mRNA) and fragments for use as PCR primers for the amplification or mutation of 1722, 10280, 59917, 85553, 10653, 9235, 21668, 17794, 2210, 6169, 10102, 21061, 17662, 1468, 12282, 6350, 9035, 1820, 23652, 7301, 8925, 8701, 3533, 9462, 9123, 12788, 17729, 65552, 1261, 21476, 33770, 9380, 2569654, 33556, 53656, 44143, 32612, 10671, 261, 44570, 41922, 2552, 2417, 19319, 43969, 8921, 8993, 955, 32345, 966, 1920, 17318, 1510, 14180, 26005, 554, 16408, 42028, 112091, 13886, 13942, 1673, 54946 or 2419 nucleic acid molecules. As used herein, the term “nucleic acid molecule” is intended to include DNA molecules (e.g., cDNA or genomic DNA) and RNA molecules (e.g., mRNA) and analogs of the DNA or RNA generated using nucleotide analogs. The nucleic acid molecule can be single-stranded or double-stranded, but preferably is double-stranded DNA.

[0449] A nucleic acid molecule used in the methods of the present invention, e.g., a nucleic acid molecule having the nucleotide sequence of SEQ ID NO:1, 3, 5, 7, 9, 11, 13, 15, 17, 19, 21, 23, 25, 27, 29, 31, 33, 35, 37, 39, 41, 43, 45, 47, 49, 51, 53, 55, 57, 59, 61, 63, 65, 67, 69, 71, 73, 75, 77, 79, 81, 83, 85, 87, 89, 91, 93, 95, 97, 99, 101, 103, 105, 107, 109, 111, 113, 115, 117, 119, 121, 123, 125 or 127 or a portion thereof, can be isolated using standard molecular biology techniques and the sequence information provided herein. Using all or portion of the nucleic acid sequence of SEQ ID NO:1, 3, 5, 7, 9, 11, 13, 15, 17, 19, 21, 23, 25, 27, 29, 31, 33, 35, 37, 39, 41, 43, 45, 47, 49, 51, 53, 55, 57, 59, 61, 63, 65, 67, 69, 71, 73, 75, 77, 79, 81, 83, 85, 87, 89, 91, 93, 95, 97, 99, 101, 103, 105, 107, 109, 111, 113, 115, 117, 119, 121, 123, 125 or 127, as a hybridization probe, 1722, 10280, 59917, 85553, 10653, 9235, 21668, 17794, 2210, 6169, 10102, 21061, 17662, 1468, 12282, 6350, 9035, 1820, 23652, 7301, 8925, 8701, 3533, 9462, 9123, 12788, 17729, 65552, 1261, 21476, 33770, 9380, 2569654, 33556, 53656, 44143, 32612, 10671, 261, 44570, 41922, 2552, 2417, 19319, 43969, 8921, 8993, 955, 32345, 966, 1920, 17318, 1510, 14180, 26005, 554, 16408, 42028, 112091, 13886, 13942, 1673, 54946 or 2419 nucleic acid molecules can be isolated using standard hybridization and cloning techniques (e.g., as described in Sambrook, J., Fritsh, E. F., and Maniatis, T. Molecular Cloning: A Laboratory Manual. 2nd, ed., Cold Spring Harbor Laboratory, Cold Spring Harbor Laboratory Press, Cold Spring Harbor, N.Y., 1989).

[0450] Moreover, a nucleic acid molecule encompassing all or a portion of SEQ ID NO:1, 3, 5, 7, 9, 11, 13, 15, 17, 19, 21, 23, 25, 27, 29, 31, 33, 35, 37, 39, 41, 43, 45, 47, 49, 51, 53, 55, 57, 59, 61, 63, 65, 67, 69, 71, 73, 75, 77, 79, 81, 83, 85, 87, 89, 91, 93, 95, 97, 99, 101, 103, 105, 107, 109, 111, 113, 115, 117, 119, 121, 123, 125 or 127 can be isolated by the polymerase chain reaction (PCR) using synthetic oligonucleotide primers designed based upon the sequence of SEQ ID NO:1, 3, 5, 7, 9, 11, 13, 15, 17, 19, 21, 23, 25, 27, 29, 31, 33, 35, 37, 39, 41, 43, 45, 47, 49, 51, 53, 55, 57, 59, 61, 63, 65, 67, 69, 71, 73, 75, 77, 79, 81, 83, 85, 87, 89, 91, 93, 95, 97, 99, 101, 103, 105, 107, 109, 111, 113, 115, 117, 119, 121, 123, 125 or 127.

[0451] A nucleic acid used in the methods of the invention can be amplified using cDNA, mRNA or, alternatively, genomic DNA as a template and appropriate oligonucleotide primers according to standard PCR amplification techniques. Furthermore, oligonucleotides corresponding to 1722, 10280, 59917, 85553, 10653, 9235, 21668, 17794, 2210, 6169, 10102, 21061, 17662, 1468, 12282, 6350, 9035, 1820, 23652, 7301, 8925, 8701, 3533, 9462, 9123, 12788, 17729, 65552, 1261, 21476, 33770, 9380, 2569654, 33556, 53656, 44143, 32612, 10671, 261, 44570, 41922, 2552, 2417, 19319, 43969, 8921, 8993, 955, 32345, 966, 1920, 17318, 1510, 14180, 26005, 554, 16408, 42028, 112091, 13886, 13942, 1673, 54946 or 2419 nucleotide sequences can be prepared by standard synthetic techniques, e.g., using an automated DNA synthesizer.

[0452] In a preferred embodiment, the isolated nucleic acid molecules used in the methods of the invention comprise the nucleotide sequence shown in SEQ ID NO:1, 3, 5, 7, 9, 11, 13, 15, 17, 19, 21, 23, 25, 27, 29, 31, 33, 35, 37, 39, 41, 43, 45, 47, 49, 51, 53, 55, 57, 59, 61, 63, 65, 67, 69, 71, 73, 75, 77, 79, 81, 83, 85, 87, 89, 91, 93, 95, 97, 99, 101, 103, 105, 107, 109, 111, 113, 115, 117, 119, 121, 123, 125 or 127, or a complement of the nucleotide sequence shown in SEQ ID NO:1, 3, 5, 7, 9, 11, 13, 15, 17, 19, 21, 23, 25, 27, 29, 31, 33, 35, 37, 39, 41, 43, 45, 47, 49, 51, 53, 55, 57, 59, 61, 63, 65, 67, 69, 71, 73, 75, 77, 79, 81, 83, 85, 87, 89, 91, 93, 95, 97, 99, 101, 103, 105, 107, 109, 111, 113, 115, 117, 119, 121, 123, 125 or 127 or a portion of any of these nucleotide sequences. A nucleic acid molecule which is complementary to the nucleotide sequence shown in SEQ ID NO:1, 3, 5, 7, 9, 11, 13, 15, 17, 19, 21, 23, 25, 27, 29, 31, 33, 35, 37, 39, 41, 43, 45, 47, 49, 51, 53, 55, 57, 59, 61, 63, 65, 67, 69, 71, 73, 75, 77, 79, 81, 83, 85, 87, 89, 91, 93, 95, 97, 99, 101, 103, 105, 107, 109, 111, 113, 115, 117, 119, 121, 123, 125 or 127 is one which is sufficiently complementary to the nucleotide sequence shown in SEQ ID NO:1, 3, 5, 7, 9, 11, 13, 15, 17, 19, 21, 23, 25, 27, 29, 31, 33, 35, 37, 39, 41, 43, 45, 47, 49, 51, 53, 55, 57, 59, 61, 63, 65, 67, 69, 71, 73, 75, 77, 79, 81, 83, 85, 87, 89, 91, 93, 95, 97, 99, 101, 103, 105, 107, 109, 111, 113, 115, 117, 119, 121, 123, 125 or 127 such that it can hybridize to the nucleotide sequence shown in SEQ ID NO:1, 3, 5, 7, 9, 11, 13, 15, 17, 19, 21, 23, 25, 27, 29, 31, 33, 35, 37, 39, 41, 43, 45, 47, 49, 51, 53, 55, 57, 59, 61, 63, 65, 67, 69, 71, 73, 75, 77, 79, 81, 83, 85, 87, 89, 91, 93, 95, 97, 99, 101, 103, 105, 107, 109, 111, 113, 115, 117, 119, 121, 123, 125 or 127 thereby forming a stable duplex.

[0453] In still another preferred embodiment, an isolated nucleic acid molecule used in the methods of the present invention comprises a nucleotide sequence which is at least about 55%, 60%, 65%, 70%, 75%, 80%, 85%, 90%, 95%, 96%, 97%, 98%, 99% or more identical to the entire length of the nucleotide sequence shown in SEQ ID NO:1, 3, 5, 7, 9, 11, 13, 15, 17, 19, 21, 23, 25, 27, 29, 31, 33, 35, 37, 39, 41, 43, 45, 47, 49, 51, 53, 55, 57, 59, 61, 63, 65, 67, 69, 71, 73, 75, 77, 79, 81, 83, 85, 87, 89, 91, 93, 95, 97, 99, 101, 103, 105, 107, 109, 111, 113, 115, 117, 119, 121, 123, 125 or 127 or a portion of any of this nucleotide sequence.

[0454] Moreover, the nucleic acid molecules used in the methods of the invention can comprise only a portion of the nucleic acid sequence of SEQ ID NO:1, 3, 5, 7, 9, 11, 13, 15, 17, 19, 21, 23, 25, 27, 29, 31, 33, 35, 37, 39, 41, 43, 45, 47, 49, 51, 53, 55, 57, 59, 61, 63, 65, 67, 69, 71, 73, 75, 77, 79, 81, 83, 85, 87, 89, 91, 93, 95, 97, 99, 101, 103, 105, 107, 109, 111, 113, 115, 117, 119, 121, 123, 125 or 127 for example, a fragment which can be used as a probe or primer or a fragment encoding a portion of a 1722, 10280, 59917, 85553, 10653, 9235, 21668, 17794, 2210, 6169, 10102, 21061, 17662, 1468, 12282, 6350, 9035, 1820, 23652, 7301, 8925, 8701, 3533, 9462, 9123, 12788, 17729, 65552, 1261, 21476, 33770, 9380, 2569654, 33556, 53656, 44143, 32612, 10671, 261, 44570, 41922, 2552, 2417, 19319, 43969, 8921, 8993, 955, 32345, 966, 1920, 17318, 1510, 14180, 26005, 554, 16408, 42028, 112091, 13886, 13942, 1673, 54946 or 2419 protein, e.g., a biologically active portion of a 1722, 10280, 59917, 85553, 10653, 9235, 21668, 17794, 2210, 6169, 10102, 21061, 17662, 1468, 12282, 6350, 9035, 1820, 23652, 7301, 8925, 8701, 3533, 9462, 9123, 12788, 17729, 65552, 1261, 21476, 33770, 9380, 2569654, 33556, 53656, 44143, 32612, 10671, 261, 44570, 41922, 2552, 2417, 19319, 43969, 8921, 8993, 955, 32345, 966, 1920, 17318, 1510, 14180, 26005, 554, 16408, 42028, 112091, 13886, 13942, 1673, 54946 or 2419 protein. The probe/primer typically comprises substantially purified oligonucleotide. The oligonucleotide typically comprises a region of nucleotide sequence that hybridizes under stringent conditions to at least about 12 or 15, preferably about 20 or 25, more preferably about 30, 35, 40, 45, 50, 55, 60, 65, or 75 consecutive nucleotides of a sense sequence of SEQ ID NO:1, 3, 5, 7, 9, 11, 13, 15, 17, 19, 21, 23, 25, 27, 29, 31, 33, 35, 37, 39, 41, 43, 45, 47, 49, 51, 53, 55, 57, 59, 61, 63, 65, 67, 69, 71, 73, 75, 77, 79, 81, 83, 85, 87, 89, 91, 93, 95, 97, 99, 101, 103, 105, 107, 109, 111, 113, 115, 117, 119, 121, 123, 125 or 127 of an anti-sense sequence of SEQ ID NO:1, 3, 5, 7, 9, 11, 13, 15, 17, 19, 21, 23, 25, 27, 29, 31, 33, 35, 37, 39, 41, 43, 45, 47, 49, 51, 53, 55, 57, 59, 61, 63, 65, 67, 69, 71, 73, 75, 77, 79, 81, 83, 85, 87, 89, 91, 93, 95, 97, 99, 101, 103, 105, 107, 109, 111, 113, 115, 117, 119, 121, 123, 125 or 127 or of a naturally occurring allelic variant or mutant of SEQ ID NO:1, 3, 5, 7, 9, 11, 13, 15, 17, 19, 21, 23, 25, 27, 29, 31, 33, 35, 37, 39, 41, 43, 45, 47, 49, 51, 53, 55, 57, 59, 61, 63, 65, 67, 69, 71, 73, 75, 77, 79, 81, 83, 85, 87, 89, 91, 93, 95, 97, 99, 101, 103, 105, 107, 109, 111, 113, 115, 117, 119, 121, 123, 125 or 127. In one embodiment, a nucleic acid molecule used in the methods of the present invention comprises a nucleotide sequence which is greater than 100, 100-200, 200-300, 300-400, 400-500, 500-600, 600-700, 700-800, 800-900, 900-1000, 1000-1100, 1100-1200, 1200-1300, or more nucleotides in length and hybridizes under stringent hybridization conditions to a nucleic acid molecule of SEQ ID NO:1, 3, 5, 7, 9, 11, 13, 15, 17, 19, 21, 23, 25, 27, 29, 31, 33, 35, 37, 39, 41, 43, 45, 47, 49, 51, 53, 55, 57, 59, 61, 63, 65, 67, 69, 71, 73, 75, 77, 79, 81, 83, 85, 87, 89, 91, 93, 95, 97, 99, 101, 103, 105, 107, 109, 111, 113, 115, 117, 119, 121, 123, 125 or 127.

[0455] As used herein, the term “hybridizes under stringent conditions” is intended to describe conditions for hybridization and washing under which nucleotide sequences that are significantly identical or homologous to each other remain hybridized to each other. Preferably, the conditions are such that sequences at least about 70%, more preferably at least about 80%, even more preferably at least about 85% or 90% identical to each other remain hybridized to each other. Such stringent conditions are known to those skilled in the art and can be found in Current Protocols in Molecular Biology, Ausubel et al., eds., John Wiley & Sons, Inc. (1995), sections 2, 4 and 6. Additional stringent conditions can be found in Molecular Cloning: A Laboratory Manual, Sambrook et al., Cold Spring Harbor Press, Cold Spring Harbor, N.Y. (1989), chapters 7, 9 and 11. A preferred, non-limiting example of stringent hybridization conditions includes hybridization in 4× sodium chloride/sodium citrate (SSC), at about 65-70° C. (or hybridization in 4×SSC plus 50% formamide at about 42-50° C.) followed by one or more washes in 1×SSC, at about 65-70° C. A preferred, non-limiting example of highly stringent hybridization conditions includes hybridization in 1×SSC, at about 65-70° C. (or hybridization in 1×SSC plus 50% formamide at about 42-50° C.) followed by one or more washes in 0.3×SSC, at about 65-70° C. A preferred, non-limiting example of reduced stringency hybridization conditions includes hybridization in 4×SSC, at about 50-60° C. (or alternatively hybridization in 6×SSC plus 50% formamide at about 40-45° C.) followed by one or more washes in 2×SSC, at about 50-60° C. Ranges intermediate to the above-recited values, e.g., at 65-70° C. or at 42-50° C. are also intended to be encompassed by the present invention. SSPE (1×SSPE is 0.15M NaCl, 10 mM NaH₂PO₄, and 1.25 mM EDTA, pH 7.4) can be substituted for SSC (1×SSC is 0.15M NaCl and 15 mM sodium citrate) in the hybridization and wash buffers; washes are performed for 15 minutes each after hybridization is complete. The hybridization temperature for hybrids anticipated to be less than 50 base pairs in length should be 5-10° C. less than the melting temperature (Tₘ) of the hybrid, where Tₘ is determined according to the following equations. For hybrids less than 18 base pairs in length, Tₘ(° C.)=2(# of A+T bases)+4(# of G+C bases). For hybrids between 18 and 49 base pairs in length, Tₘ(° C.)=81.5+16.6(log₁₀[Na⁺])+0.41(% G+C)−(600/N), where N is the number of bases in the hybrid, and [Na⁺] is the concentration of sodium ions in the hybridization buffer ([Na⁺] for 1×SSC=0.165 M). It will also be recognized by the skilled practitioner that additional reagents may be added to hybridization and/or wash buffers to decrease non-specific hybridization of nucleic acid molecules to membranes, for example, nitrocellulose or nylon membranes, including but not limited to blocking agents (e.g., BSA or salmon or herring sperm carrier DNA), detergents (e.g., SDS), chelating agents (e.g., EDTA), Ficoll, PVP and the like. When using nylon membranes, in particular, an additional preferred, non-limiting example of stringent hybridization conditions is hybridization in 0.25-0.5M NaH₂PO₄, 7% SDS at about 65° C., followed by one or more washes at 0.02M NaH₂PO₄, 1% SDS at 65° C., see e.g., Church and Gilbert (1984) Proc. Natl. Acad. Sci. USA 81:1991-1995, (or alternatively 0.2×SSC, 1% SDS).

[0456] In preferred embodiments, the probe further comprises a label group attached thereto, e.g., the label group can be a radioisotope, a fluorescent compound, an enzyme, or an enzyme co-factor. Such probes can be used as a part of a diagnostic test kit for identifying cells or tissue which misexpress a 1722, 10280, 59917, 85553, 10653, 9235, 21668, 17794, 2210, 6169, 10102, 21061, 17662, 1468, 12282, 6350, 9035, 1820, 23652, 7301, 8925, 8701, 3533, 9462, 9123, 12788, 17729, 65552, 1261, 21476, 33770, 9380, 2569654, 33556, 53656, 44143, 32612, 10671, 261, 44570, 41922, 2552, 2417, 19319, 43969, 8921, 8993, 955, 32345, 966, 1920, 17318, 1510, 14180, 26005, 554, 16408, 42028, 112091, 13886, 13942, 1673, 54946 or 2419 protein, such as by measuring a level of a 1722, 10280, 59917, 85553, 10653, 9235, 21668, 17794, 2210, 6169, 10102, 21061, 17662, 1468, 12282, 6350, 9035, 1820, 23652, 7301, 8925, 8701, 3533, 9462, 9123, 12788, 17729, 65552, 1261, 21476, 33770, 9380, 2569654, 33556, 53656, 44143, 32612, 10671, 261, 44570, 41922, 2552, 2417, 19319, 43969, 8921, 8993, 955, 32345, 966, 1920, 17318, 1510, 14180, 26005, 554, 16408, 42028, 112091, 13886, 13942, 1673, 54946 or 2419-encoding nucleic acid in a sample of cells from a subject e.g., detecting 1722, 10280, 59917, 85553, 10653, 9235, 21668, 17794, 2210, 6169, 10102, 21061, 17662, 1468, 12282, 6350, 9035, 1820, 23652, 7301, 8925, 8701, 3533, 9462, 9123, 12788, 17729, 65552, 1261, 21476, 33770, 9380, 2569654, 33556, 53656, 44143, 32612, 10671, 261, 44570, 41922, 2552, 2417, 19319, 43969, 8921, 8993, 955, 32345, 966, 1920, 17318, 1510, 14180, 26005, 554, 16408, 42028, 112091, 13886, 13942, 1673, 54946 or 2419 mRNA levels or determining whether a genomic 1722, 10280, 59917, 85553, 10653, 9235, 21668, 17794, 2210, 6169, 10102, 21061, 17662, 1468, 12282, 6350, 9035, 1820, 23652, 7301, 8925, 8701, 3533, 9462, 9123, 12788, 17729, 65552, 1261, 21476, 33770, 9380, 2569654, 33556, 53656, 44143, 32612, 10671, 261, 44570, 41922, 2552, 2417, 19319, 43969, 8921, 8993, 955, 32345, 966, 1920, 17318, 1510, 14180, 26005, 554, 16408, 42028, 112091, 13886, 13942, 1673, 54946 or 2419 gene has been mutated or deleted.

[0457] The methods of the invention further encompass the use of nucleic acid molecules that differ from the nucleotide sequence shown in SEQ ID NO:1, 3, 5, 7, 9, 11, 13, 15, 17, 19, 21, 23, 25, 27, 29, 31, 33, 35, 37, 39, 41, 43, 45, 47, 49, 51, 53, 55, 57, 59, 61, 63, 65, 67, 69, 71, 73, 75, 77, 79, 81, 83, 85, 87, 89, 91, 93, 95, 97, 99, 101, 103, 105, 107, 109, 111, 113, 115, 117, 119, 121, 123, 125 or 127 due to degeneracy of the genetic code and thus encode the same 1722, 10280, 59917, 85553, 10653, 9235, 21668, 17794, 2210, 6169, 10102, 21061, 17662, 1468, 12282, 6350, 9035, 1820, 23652, 7301, 8925, 8701, 3533, 9462, 9123, 12788, 17729, 65552, 1261, 21476, 33770, 9380, 2569654, 33556, 53656, 44143, 32612, 10671, 261, 44570, 41922, 2552, 2417, 19319, 43969, 8921, 8993, 955, 32345, 966, 1920, 17318, 1510, 14180, 26005, 554, 16408, 42028, 112091, 13886, 13942, 1673, 54946 or 2419 proteins as those encoded by the nucleotide sequence shown in SEQ ID NO:1, 3, 5, 7, 9, 11, 13, 15, 17, 19, 21, 23, 25, 27, 29, 31, 33, 35, 37, 39, 41, 43, 45, 47, 49, 51, 53, 55, 57, 59, 61, 63, 65, 67, 69, 71, 73, 75, 77, 79, 81, 83, 85, 87, 89, 91, 93, 95, 97, 99, 101, 103, 105, 107, 109, 111, 113, 115, 117, 119, 121, 123, 125 or 127. In another embodiment, an isolated nucleic acid molecule included in the methods of the invention has a nucleotide sequence encoding a protein having an amino acid sequence shown in SEQ ID NO:1, 3, 5, 7, 9, 11, 13, 15, 17, 19, 21, 23, 25, 27, 29, 31, 33, 35, 37, 39, 41, 43, 45, 47, 49, 51, 53, 55, 57, 59, 61, 63, 65, 67, 69, 71, 73, 75, 77, 79, 81, 83, 85, 87, 89, 91, 93, 95, 97, 99, 101, 103, 105, 107, 109, 111, 113, 115, 117, 119, 121, 123, 125 or 127.

[0458] The methods of the invention further include the use of allelic variants of human 1722, 10280, 59917, 85553, 10653, 9235, 21668, 17794, 2210, 6169, 10102, 21061, 17662, 1468, 12282, 6350, 9035, 1820, 23652, 7301, 8925, 8701, 3533, 9462, 9123, 12788, 17729, 65552, 1261, 21476, 33770, 9380, 2569654, 33556, 53656, 44143, 32612, 10671, 261, 44570, 41922, 2552, 2417, 19319, 43969, 8921, 8993, 955, 32345, 966, 1920, 17318, 1510, 14180, 26005, 554, 16408, 42028, 112091, 13886, 13942, 1673, 54946 or 2419, e.g., functional and non-functional allelic variants. Functional allelic variants are naturally occurring amino acid sequence variants of the human 1722, 10280, 59917, 85553, 10653, 9235, 21668, 17794, 2210, 6169, 10102, 21061, 17662, 1468, 12282, 6350, 9035, 1820, 23652, 7301, 8925, 8701, 3533, 9462, 9123, 12788, 17729, 65552, 1261, 21476, 33770, 9380, 2569654, 33556, 53656, 44143, 32612, 10671, 261, 44570, 41922, 2552, 2417, 19319, 43969, 8921, 8993, 955, 32345, 966, 1920, 17318, 1510, 14180, 26005, 554, 16408, 42028, 112091, 13886, 13942, 1673, 54946 or 2419 protein that maintain a 1722, 10280, 59917, 85553, 10653, 9235, 21668, 17794, 2210, 6169, 10102, 21061, 17662, 1468, 12282, 6350, 9035, 1820, 23652, 7301, 8925, 8701, 3533, 9462, 9123, 12788, 17729, 65552, 1261, 21476, 33770, 9380, 2569654, 33556, 53656, 44143, 32612, 10671, 261, 44570, 41922, 2552, 2417, 19319, 43969, 8921, 8993, 955, 32345, 966, 1920, 17318, 1510, 14180, 26005, 554, 16408, 42028, 112091, 13886, 13942, 1673, 54946 or 2419 activity. Functional allelic variants will typically contain only conservative substitution of one or more amino acids of SEQ ID NO:2, 4, 6, 8, 10, 12, 14, 16, 18, 20, 22, 24, 26, 28, 30, 32, 34, 36, 38, 40, 42, 44, 46, 48, 50, 52, 54, 56, 58, 60, 62, 64, 66, 68, 70, 72, 74, 76, 78, 80, 82, 84, 86, 88, 90, 92, 94, 96, 98, 100, 102, 104, 106, 108, 110, 112, 114, 116, 118, 120, 122, 124, 126 or 128 or substitution, deletion or insertion of non-critical residues in non-critical regions of the protein.

[0459] Non-functional allelic variants are naturally occurring amino acid sequence variants of the human 1722, 10280, 59917, 85553, 10653, 9235, 21668, 17794, 2210, 6169, 10102, 21061, 17662, 1468, 12282, 6350, 9035, 1820, 23652, 7301, 8925, 8701, 3533, 9462, 9123, 12788, 17729, 65552, 1261, 21476, 33770, 9380, 2569654, 33556, 53656, 44143, 32612, 10671, 261, 44570, 41922, 2552, 2417, 19319, 43969, 8921, 8993, 955, 32345, 966, 1920, 17318, 1510, 14180, 26005, 554, 16408, 42028, 112091, 13886, 13942, 1673, 54946 or 2419 protein that do not have a 1722, 10280, 59917, 85553, 10653, 9235, 21668, 17794, 2210, 6169, 10102, 21061, 17662, 1468, 12282, 6350, 9035, 1820, 23652, 7301, 8925, 8701, 3533, 9462, 9123, 12788, 17729, 65552, 1261, 21476, 33770, 9380, 2569654, 33556, 53656, 44143, 32612, 10671, 261, 44570, 41922, 2552, 2417, 19319, 43969, 8921, 8993, 955, 32345, 966, 1920, 17318, 1510, 14180, 26005, 554, 16408, 42028, 112091, 13886, 13942, 1673, 54946 or 2419 activity. Non-functional allelic variants will typically contain a non-conservative substitution, deletion, or insertion or premature truncation of the amino acid sequence of SEQ ID NO:2, 4, 6, 8, 10, 12, 14, 16, 18, 20, 22, 24, 26, 28, 30, 32, 34, 36, 38, 40, 42, 44, 46, 48, 50, 52, 54, 56, 58, 60, 62, 64, 66, 68, 70, 72, 74, 76, 78, 80, 82, 84, 86, 88, 90, 92, 94, 96, 98, 100, 102, 104, 106, 108, 110, 112, 114, 116, 118, 120, 122, 124, 126 or 128, or a substitution, insertion or deletion in critical residues or critical regions of the protein.

[0460] The methods of the present invention may further use non-human orthologues of the human 1722, 10280, 59917, 85553, 10653, 9235, 21668, 17794, 2210, 6169, 10102, 21061, 17662, 1468, 12282, 6350, 9035, 1820, 23652, 7301, 8925, 8701, 3533, 9462, 9123, 12788, 17729, 65552, 1261, 21476, 33770, 9380, 2569654, 33556, 53656, 44143, 32612, 10671, 261, 44570, 41922, 2552, 2417, 19319, 43969, 8921, 8993, 955, 32345, 966, 1920, 17318, 1510, 14180, 26005, 554, 16408, 42028, 112091, 13886, 13942, 1673, 54946 or 2419 protein. Orthologues of the human 1722, 10280, 59917, 85553, 10653, 9235, 21668, 17794, 2210, 6169, 10102, 21061, 17662, 1468, 12282, 6350, 9035, 1820, 23652, 7301, 8925, 8701, 3533, 9462, 9123, 12788, 17729, 65552, 1261, 21476, 33770, 9380, 2569654, 33556, 53656, 44143, 32612, 10671, 261, 44570, 41922, 2552, 2417, 19319, 43969, 8921, 8993, 955, 32345, 966, 1920, 17318, 1510, 14180, 26005, 554, 16408, 42028, 112091, 13886, 13942, 1673, 54946 or 2419 protein are proteins that are isolated from non-human organisms and possess the same 1722, 10280, 59917, 85553, 10653, 9235, 21668, 17794, 2210, 6169, 10102, 21061, 17662, 1468, 12282, 6350, 9035, 1820, 23652, 7301, 8925, 8701, 3533, 9462, 9123, 12788, 17729, 65552, 1261, 21476, 33770, 9380, 2569654, 33556, 53656, 44143, 32612, 10671, 261, 44570, 41922, 2552, 2417, 19319, 43969, 8921, 8993, 955, 32345, 966, 1920, 17318, 1510, 14180, 26005, 554, 16408, 42028, 112091, 13886, 13942, 1673, 54946 or 2419 activity.

[0461] The methods of the present invention further include the use of nucleic acid molecules comprising the nucleotide sequence of SEQ ID NO:1, 3, 5, 7, 9, 11, 13, 15, 17, 19, 21, 23, 25, 27, 29, 31, 33, 35, 37, 39, 41, 43, 45, 47, 49, 51, 53, 55, 57, 59, 61, 63, 65, 67, 69, 71, 73, 75, 77, 79, 81, 83, 85, 87, 89, 91, 93, 95, 97, 99, 101, 103, 105, 107, 109, 111, 113, 115, 117, 119, 121, 123, 125 or 127 or a portion thereof, in which a mutation has been introduced. The mutation may lead to amino acid substitutions at “non-essential” amino acid residues or at “essential” amino acid residues. A “non-essential” amino acid residue is a residue that can be altered from the wild-type sequence of 1722, 10280, 59917, 85553, 10653, 9235, 21668, 17794, 2210, 6169, 10102, 21061, 17662, 1468, 12282, 6350, 9035, 1820, 23652, 7301, 8925, 8701, 3533, 9462, 9123, 12788, 17729, 65552, 1261, 21476, 33770, 9380, 2569654, 33556, 53656, 44143, 32612, 10671, 261, 44570, 41922, 2552, 2417, 19319, 43969, 8921, 8993, 955, 32345, 966, 1920, 17318, 1510, 14180, 26005, 554, 16408, 42028, 112091, 13886, 13942, 1673, 54946 or 2419 (e.g., the sequence of SEQ ID NO:2, 4, 6, 8, 10, 12, 14, 16, 18, 20, 22, 24, 26, 28, 30, 32, 34, 36, 38, 40, 42, 44, 46, 48, 50, 52, 54, 56, 58, 60, 62, 64, 66, 68, 70, 72, 74, 76, 78, 80, 82, 84, 86, 88, 90, 92, 94, 96, 98, 100, 102, 104, 106, 108, 110, 112, 114, 116, 118, 120, 122, 124, 126 or 128 without altering the biological activity, whereas an “essential” amino acid residue is required for biological activity. For example, amino acid residues that are conserved among the 1722, 10280, 59917, 85553, 10653, 9235, 21668, 17794, 2210, 6169, 10102, 21061, 17662, 1468, 12282, 6350, 9035, 1820, 23652, 7301, 8925, 8701, 3533, 9462, 9123, 12788, 17729, 65552, 1261, 21476, 33770, 9380, 2569654, 33556, 53656, 44143, 32612, 10671, 261, 44570, 41922, 2552, 2417, 19319, 43969, 8921, 8993, 955, 32345, 966, 1920, 17318, 1510, 14180, 26005, 554, 16408, 42028, 112091, 13886, 13942, 1673, 54946 or 2419 proteins of the present invention and other members of the family are not likely to be amenable to alteration.

[0462] Mutations can be introduced into SEQ ID NO:1, 3, 5, 7, 9, 11, 13, 15, 17, 19, 21, 23, 25, 27, 29, 31, 33, 35, 37, 39, 41, 43, 45, 47, 49, 51, 53, 55, 57, 59, 61, 63, 65, 67, 69, 71, 73, 75, 77, 79, 81, 83, 85, 87, 89, 91, 93, 95, 97, 99, 101, 103, 105, 107, 109, 111, 113, 115, 117, 119, 121, 123, 125 or 127 by standard techniques, such as site-directed mutagenesis and PCR-mediated mutagenesis. Preferably, conservative amino acid substitutions are made at one or more predicted non-essential amino acid residues. A “conservative amino acid substitution” is one in which the amino acid residue is replaced with an amino acid residue having a similar side chain. Families of amino acid residues having similar side chains have been defined in the art. These families include amino acids with basic side chains (e.g., lysine, arginine, histidine), acidic side chains (e.g., aspartic acid, glutamic acid), uncharged polar side chains (e.g., asparagine, glutamine, serine, threonine, tyrosine, cysteine), nonpolar side chains (e.g., glycine, alanine, valine, leucine, isoleucine, proline, phenylalanine, methionine, tryptophan), beta-branched side chains (e.g., threonine, valine, isoleucine) and aromatic side chains (e.g., tyrosine, phenylalanine, tryptophan, histidine). Thus, a predicted nonessential amino acid residue in a 1722, 10280, 59917, 85553, 10653, 9235, 21668, 17794, 2210, 6169, 10102, 21061, 17662, 1468, 12282, 6350, 9035, 1820, 23652, 7301, 8925, 8701, 3533, 9462, 9123, 12788, 17729, 65552, 1261, 21476, 33770, 9380, 2569654, 33556, 53656, 44143, 32612, 10671, 261, 44570, 41922, 2552, 2417, 19319, 43969, 8921, 8993, 955, 32345, 966, 1920, 17318, 1510, 14180, 26005, 554, 16408, 42028, 112091, 13886, 13942, 1673, 54946 or 2419 protein is preferably replaced with another amino acid residue from the same side chain family. Alternatively, in another embodiment, mutations can be introduced randomly along all or part of a 1722, 10280, 59917, 85553, 10653, 9235, 21668, 17794, 2210, 6169, 10102, 21061, 17662, 1468, 12282, 6350, 9035, 1820, 23652, 7301, 8925, 8701, 3533, 9462, 9123, 12788, 17729, 65552, 1261, 21476, 33770, 9380, 2569654, 33556, 53656, 44143, 32612, 10671, 261, 44570, 41922, 2552, 2417, 19319, 43969, 8921, 8993, 955, 32345, 966, 1920, 17318, 1510, 14180, 26005, 554, 16408, 42028, 112091, 13886, 13942, 1673, 54946 or 2419 coding sequence, such as by saturation mutagenesis, and the resultant mutants can be screened for 1722, 10280, 59917, 85553, 10653, 9235, 21668, 17794, 2210, 6169, 10102, 21061, 17662, 1468, 12282, 6350, 9035, 1820, 23652, 7301, 8925, 8701, 3533, 9462, 9123, 12788, 17729, 65552, 1261, 21476, 33770, 9380, 2569654, 33556, 53656, 44143, 32612, 10671, 261, 44570, 41922, 2552, 2417, 19319, 43969, 8921, 8993, 955, 32345, 966, 1920, 17318, 1510, 14180, 26005, 554, 16408, 42028, 112091, 13886, 13942, 1673, 54946 or 2419 biological activity to identify mutants that retain activity. Following mutagenesis of SEQ ID NO:1, 3, 5, 7, 9, 11, 13, 15, 17, 19, 21, 23, 25, 27, 29, 31, 33, 35, 37, 39, 41, 43, 45, 47, 49, 51, 53, 55, 57, 59, 61, 63, 65, 67, 69, 71, 73, 75, 77, 79, 81, 83, 85, 87, 89, 91, 93, 95, 97, 99, 101, 103, 105, 107, 109, 111, 113, 115, 117, 119, 121, 123, 125 or 127, the encoded protein can be expressed recombinantly and the activity of the protein can be determined using the assay described herein.

[0463] Another aspect of the invention pertains to the use of isolated nucleic acid molecules which are antisense to the nucleotide sequence of SEQ ID NO:1, 3, 5, 7, 9, 11, 13, 15, 17, 19, 21, 23, 25, 27, 29, 31, 33, 35, 37, 39, 41, 43, 45, 47, 49, 51, 53, 55, 57, 59, 61, 63, 65, 67, 69, 71, 73, 75, 77, 79, 81, 83, 85, 87, 89, 91, 93, 95, 97, 99, 101, 103, 105, 107, 109, 111, 113, 115, 117, 119, 121, 123, 125 or 127. An “antisense” nucleic acid comprises a nucleotide sequence which is complementary to a “sense” nucleic acid encoding a protein, e.g., complementary to the coding strand of a double-stranded cDNA molecule or complementary to an mRNA sequence. Accordingly, an antisense nucleic acid can hydrogen bond to a sense nucleic acid. The antisense nucleic acid can be complementary to an entire 1722, 10280, 59917, 85553, 10653, 9235, 21668, 17794, 2210, 6169, 10102, 21061, 17662, 1468, 12282, 6350, 9035, 1820, 23652, 7301, 8925, 8701, 3533, 9462, 9123, 12788, 17729, 65552, 1261, 21476, 33770, 9380, 2569654, 33556, 53656, 44143, 32612, 10671, 261, 44570, 41922, 2552, 2417, 19319, 43969, 8921, 8993, 955, 32345, 966, 1920, 17318, 1510, 14180, 26005, 554, 16408, 42028, 112091, 13886, 13942, 1673, 54946 or 2419 coding strand, or to only a portion thereof. In one embodiment, an antisense nucleic acid molecule is antisense to a “coding region” of the coding strand of a nucleotide sequence encoding a 1722, 10280, 59917, 85553, 10653, 9235, 21668, 17794, 2210, 6169, 10102, 21061, 17662, 1468, 12282, 6350, 9035, 1820, 23652, 7301, 8925, 8701, 3533, 9462, 9123, 12788, 17729, 65552, 1261, 21476, 33770, 9380, 2569654, 33556, 53656, 44143, 32612, 10671, 261, 44570, 41922, 2552, 2417, 19319, 43969, 8921, 8993, 955, 32345, 966, 1920, 17318, 1510, 14180, 26005, 554, 16408, 42028, 112091, 13886, 13942, 1673, 54946 or 2419. The term “coding region” refers to the region of the nucleotide sequence comprising codons which are translated into amino acid residues. In another embodiment, the antisense nucleic acid molecule is antisense to a “noncoding region” of the coding strand of a nucleotide sequence encoding 1722, 10280, 59917, 85553, 10653, 9235, 21668, 17794, 2210, 6169, 10102, 21061, 17662, 1468, 12282, 6350, 9035, 1820, 23652, 7301, 8925, 8701, 3533, 9462, 9123, 12788, 17729, 65552, 1261, 21476, 33770, 9380, 2569654, 33556, 53656, 44143, 32612, 10671, 261, 44570, 41922, 2552, 2417, 19319, 43969, 8921, 8993, 955, 32345, 966, 1920, 17318, 1510, 14180, 26005, 554, 16408, 42028, 112091, 13886, 13942, 1673, 54946 or 2419. The term “noncoding region” refers to 5′ and 3′ sequences which flank the coding region that are not translated into amino acids (also referred to as 5′ and 3′ untranslated regions).

[0464] Given the coding strand sequences encoding 1722, 10280, 59917, 85553, 10653, 9235, 21668, 17794, 2210, 6169, 10102, 21061, 17662, 1468, 12282, 6350, 9035, 1820, 23652, 7301, 8925, 8701, 3533, 9462, 9123, 12788, 17729, 65552, 1261, 21476, 33770, 9380, 2569654, 33556, 53656, 44143, 32612, 10671, 261, 44570, 41922, 2552, 2417, 19319, 43969, 8921, 8993, 955, 32345, 966, 1920, 17318, 1510, 14180, 26005, 554, 16408, 42028, 112091, 13886, 13942, 1673, 54946 or 2419 disclosed herein, antisense nucleic acids of the invention can be designed according to the rules of Watson and Crick base pairing. The antisense nucleic acid molecule can be complementary to the entire coding region of 1722, 10280, 59917, 85553, 10653, 9235, 21668, 17794, 2210, 6169, 10102, 21061, 17662, 1468, 12282, 6350, 9035, 1820, 23652, 7301, 8925, 8701, 3533, 9462, 9123, 12788, 17729, 65552, 1261, 21476, 33770, 9380, 2569654, 33556, 53656, 44143, 32612, 10671, 261, 44570, 41922, 2552, 2417, 19319, 43969, 8921, 8993, 955, 32345, 966, 1920, 17318, 1510, 14180, 26005, 554, 16408, 42028, 112091, 13886, 13942, 1673, 54946 or 2419 mRNA, but more preferably is an oligonucleotide which is antisense to only a portion of the coding or noncoding region of 1722, 10280, 59917, 85553, 10653, 9235, 21668, 17794, 2210, 6169, 10102, 21061, 17662, 1468, 12282, 6350, 9035, 1820, 23652, 7301, 8925, 8701, 3533, 9462, 9123, 12788, 17729, 65552, 1261, 21476, 33770, 9380, 2569654, 33556, 53656, 44143, 32612, 10671, 261, 44570, 41922, 2552, 2417, 19319, 43969, 8921, 8993, 955, 32345, 966, 1920, 17318, 1510, 14180, 26005, 554, 16408, 42028, 112091, 13886, 13942, 1673, 54946 or 2419 mRNA. For example, the antisense oligonucleotide can be complementary to the region surrounding the translation start site of 1722, 10280, 59917, 85553, 10653, 9235, 21668, 17794, 2210, 6169, 10102, 21061, 17662, 1468, 12282, 6350, 9035, 1820, 23652, 7301, 8925, 8701, 3533, 9462, 9123, 12788, 17729, 65552, 1261, 21476, 33770, 9380, 2569654, 33556, 53656, 44143, 32612, 10671, 261, 44570, 41922, 2552, 2417, 19319, 43969, 8921, 8993, 955, 32345, 966, 1920, 17318, 1510, 14180, 26005, 554, 16408, 42028, 112091, 13886, 13942, 1673, 54946 or 2419 mRNA. An antisense oligonucleotide can be, for example, about 5, 10, 15, 20, 25, 30, 35, 40, 45 or 50 nucleotides in length. An antisense nucleic acid of the invention can be constructed using chemical synthesis and enzymatic ligation reactions using procedures known in the art. For example, an antisense nucleic acid (e.g., an antisense oligonucleotide) can be chemically synthesized using naturally occurring nucleotides or variously modified nucleotides designed to increase the biological stability of the molecules or to increase the physical stability of the duplex formed between the antisense and sense nucleic acids, e.g., phosphorothioate derivatives and acridine substituted nucleotides can be used. Examples of modified nucleotides which can be used to generate the antisense nucleic acid include 5-fluorouracil, 5-bromouracil, 5-chlorouracil, 5-iodouracil, hypoxanthine, xantine, 4-acetylcytosine, 5-(carboxyhydroxylmethyl) uracil, 5-carboxymethylaminomethyl-2-thiouridine, 5-carboxymethylaminomethyluracil, dihydrouracil, beta-D-galactosylqueosine, inosine, N6-isopentenyladenine, 1-methylguanine, 1-methylinosine, 2,2-dimethylguanine, 2-methyladenine, 2-methylguanine, 3-methylcytosine, 5-methylcytosine, N6-adenine, 7-methylguanine, 5-methylaminomethyluracil, 5-methoxyaminomethyl-2-thiouracil, beta-D-mannosylqueosine, 5′-methoxycarboxymethyluracil, 5-methoxyuracil, 2-methylthio-N-6-isopentenyladenine, uracil-5-oxyacetic acid (v), wybutoxosine, pseudouracil, queosine, 2-thiocytosine, 5-methyl-2-thiouracil, 2-thiouracil, 4-thiouracil, 5-methyluracil, uracil-5-oxyacetic acid methylester, uracil-5-oxyacetic acid (v), 5-methyl-2-thiouracil, 3-(3-amino-3-N-2-carboxypropyl) uracil, (acp3)w, and 2,6-diaminopurine. Alternatively, the antisense nucleic acid can be produced biologically using an expression vector into which a nucleic acid has been subcloned in an antisense orientation (i.e., RNA transcribed from the inserted nucleic acid will be of an antisense orientation to a target nucleic acid of interest). Antisense nucleic acid molecules used in the methods of the invention are further described above, in section IV.

[0465] In yet another embodiment, the 1722, 10280, 59917, 85553, 10653, 9235, 21668, 17794, 2210, 6169, 10102, 21061, 17662, 1468, 12282, 6350, 9035, 1820, 23652, 7301, 8925, 8701, 3533, 9462, 9123, 12788, 17729, 65552, 1261, 21476, 33770, 9380, 2569654, 33556, 53656, 44143, 32612, 10671, 261, 44570, 41922, 2552, 2417, 19319, 43969, 8921, 8993, 955, 32345, 966, 1920, 17318, 1510, 14180, 26005, 554, 16408, 42028, 112091, 13886, 13942, 1673, 54946 or 2419 nucleic acid molecules used in the methods of the present invention can be modified at the base moiety, sugar moiety or phosphate backbone to improve, e.g., the stability, hybridization, or solubility of the molecule. For example, the deoxyribose phosphate backbone of the nucleic acid molecules can be modified to generate peptide nucleic acids (see Hyrup B. et al. (1996) Bioorganic & Medicinal Chemistry 4 (1): 5-23). As used herein, the terms “peptide nucleic acids” or “PNAs” refer to nucleic acid mimics, e.g., DNA mimics, in which the deoxyribose phosphate backbone is replaced by a pseudopeptide backbone and only the four natural nucleobases are retained. The neutral backbone of PNAs has been shown to allow for specific hybridization to DNA and RNA under conditions of low ionic strength. The synthesis of PNA oligomers can be performed using standard solid phase peptide synthesis protocols as described in Hyrup B. et al. (1996) supra; Perry-OKeefe et al. (1996) Proc. Natl. Acad. Sci. 93:14670-675.

[0466] PNAs of 1722, 10280, 59917, 85553, 10653, 9235, 21668, 17794, 2210, 6169, 10102, 21061, 17662, 1468, 12282, 6350, 9035, 1820, 23652, 7301, 8925, 8701, 3533, 9462, 9123, 12788, 17729, 65552, 1261, 21476, 33770, 9380, 2569654, 33556, 53656, 44143, 32612, 10671, 261, 44570, 41922, 2552, 2417, 19319, 43969, 8921, 8993, 955, 32345, 966, 1920, 17318, 1510, 14180, 26005, 554, 16408, 42028, 112091, 13886, 13942, 1673, 54946 or 2419 nucleic acid molecules can be used in the therapeutic and diagnostic applications described herein. For example, PNAs can be used as antisense or antigene agents for sequence-specific modulation of gene expression by, for example, inducing transcription or translation arrest or inhibiting replication. PNAs of 1722, 10280, 59917, 85553, 10653, 9235, 21668, 17794, 2210, 6169, 10102, 21061, 17662, 1468, 12282, 6350, 9035, 1820, 23652, 7301, 8925, 8701, 3533, 9462, 9123, 12788, 17729, 65552, 1261, 21476, 33770, 9380, 2569654, 33556, 53656, 44143, 32612, 10671, 261, 44570, 41922, 2552, 2417, 19319, 43969, 8921, 8993, 955, 32345, 966, 1920, 17318, 1510, 14180, 26005, 554, 16408, 42028, 112091, 13886, 13942, 1673, 54946 or 2419 nucleic acid molecules can also be used in the analysis of single base pair mutations in a gene, (e.g., by PNA-directed PCR clamping); as ‘artificial restriction enzymes’ when used in combination with other enzymes, (e.g., S1 nucleases (Hyrup B. et al. (1996) supra)); or as probes or primers for DNA sequencing or hybridization (Hyrup B. et al. (1996) supra; Perry-O'Keefe et al. (1996) supra).

[0467] In another embodiment, PNAs of 1722, 10280, 59917, 85553, 10653, 9235, 21668, 17794, 2210, 6169, 10102, 21061, 17662, 1468, 12282, 6350, 9035, 1820, 23652, 7301, 8925, 8701, 3533, 9462, 9123, 12788, 17729, 65552, 1261, 21476, 33770, 9380, 2569654, 33556, 53656, 44143, 32612, 10671, 261, 44570, 41922, 2552, 2417, 19319, 43969, 8921, 8993, 955, 32345, 966, 1920, 17318, 1510, 14180, 26005, 554, 16408, 42028, 112091, 13886, 13942, 1673, 54946 or 2419 can be modified, (e.g., to enhance their stability or cellular uptake), by attaching lipophilic or other helper groups to PNA, by the formation of PNA-DNA chimeras, or by the use of liposomes or other techniques of drug delivery known in the art. For example, PNA-DNA chimeras of 1722, 10280, 59917, 85553, 10653, 9235, 21668, 17794, 2210, 6169, 10102, 21061, 17662, 1468, 12282, 6350, 9035, 1820, 23652, 7301, 8925, 8701, 3533, 9462, 9123, 12788, 17729, 65552, 1261, 21476, 33770, 9380, 2569654, 33556, 53656, 44143, 32612, 10671, 261, 44570, 41922, 2552, 2417, 19319, 43969, 8921, 8993, 955, 32345, 966, 1920, 17318, 1510, 14180, 26005, 554, 16408, 42028, 112091, 13886, 13942, 1673, 54946 or 2419 nucleic acid molecules can be generated which may combine the advantageous properties of PNA and DNA. Such chimeras allow DNA recognition enzymes, (e.g., RNAse H and DNA polymerases), to interact with the DNA portion while the PNA portion would provide high binding affinity and specificity. PNA-DNA chimeras can be linked using linkers of appropriate lengths selected in terms of base stacking, number of bonds between the nucleobases, and orientation (Hyrup B. et al. (1996) supra). The synthesis of PNA-DNA chimeras can be performed as described in Hyrup B. et al. (1996) supra and Finn P. J. et al. (1996) Nucleic Acids Res. 24 (17): 3357-63. For example, a DNA chain can be synthesized on a solid support using standard phosphoramidite coupling chemistry and modified nucleoside analogs, e.g., 5′-(4-methoxytrityl)amino-5′-deoxy-thymidine phosphoramidite, can be used as a between the PNA and the 5′ end of DNA (Mag, M. et al. (1989) Nucleic Acid Res. 17: 5973-88). PNA monomers are then coupled in a stepwise manner to produce a chimeric molecule with a 5′ PNA segment and a 3′ DNA segment (Finn P. J. et al. (1996) supra). Alternatively, chimeric molecules can be synthesized with a 5′ DNA segment and a 3 'PNA segment (Peterser, K. H. et al. (1975) Bioorganic Med. Chem. Lett. 5: 1119-11124).

[0468] In other embodiments, the oligonucleotide used in the methods of the invention may include other appended groups such as peptides (e.g., for targeting host cell receptors in vivo), or agents facilitating transport across the cell membrane (see, e.g., Letsinger et al. (1989) Proc. Natl. Acad. Sci. USA 86:6553-6556; Lemaitre et al. (1987) Proc. Natl. Acad. Sci. USA 84:648-652; PCT Publication No. WO88/09810) or the blood-brain barrier (see, e.g., PCT Publication No. WO89/10134). In addition, oligonucleotides can be modified with hybridization-triggered cleavage agents (See, e.g., Krol et al. (1988) Bio-Techniques 6:958-976) or intercalating agents. (See, e.g., Zon (1988) Pharm. Res. 5:539-549). To this end, the oligonucleotide may be conjugated to another molecule, (e.g., a peptide, hybridization triggered cross-linking agent, transport agent, or hybridization-triggered cleavage agent).

[0469] VII. Isolated 1722, 10280, 59917, 85553, 10653, 9235, 21668, 17794, 2210, 6169, 10102, 21061, 17662, 1468, 12282, 6350, 9035, 1820, 23652, 7301, 8925, 8701, 3533, 9462, 9123, 12788, 17729, 65552, 1261, 21476, 33770, 9380, 2569654, 33556, 53656, 44143, 32612, 10671, 261, 44570.41922, 2552, 2417, 19319, 43969, 8921, 8993, 955, 32345, 966, 1920, 17318, 1510, 14180, 26005, 554, 16408, 42028, 112091, 13886, 13942, 1673, 54946 or 2419 Proteins and Anti-1722, 10280, 59917, 85553, 10653, 9235, 21668, 17794, 2210, 6169, 10102, 21061, 17662, 1468, 12282, 6350, 9035, 1820, 23652, 7301, 8925, 8701, 3533, 9462, 9123, 12788, 17729, 65552, 1261, 21476, 33770, 9380, 2569654, 33556, 53656, 44143, 32612, 10671, 261, 44570, 41922, 2552, 2417, 19319, 43969, 8921, 8993, 955, 32345, 966, 1920, 17318, 1510, 14180, 26005, 554, 16408, 42028, 112091, 13886, 13942, 1673, 54946 or 2419 Antibodies Used in the Methods of the Invention

[0470] The methods of the invention include the use of isolated 1722, 10280, 59917, 85553, 10653, 9235, 21668, 17794, 2210, 6169, 10102, 21061, 17662, 1468, 12282, 6350, 9035, 1820, 23652, 7301, 8925, 8701, 3533, 9462, 9123, 12788, 17729, 65552, 1261, 21476, 33770, 9380, 2569654, 33556, 53656, 44143, 32612, 10671, 261, 44570, 41922, 2552, 2417, 19319, 43969, 8921, 8993, 955, 32345, 966, 1920, 17318, 1510, 14180, 26005, 554, 16408, 42028, 112091, 13886, 13942, 1673, 54946 or 2419 proteins, and biologically active portions thereof, as well as polypeptide fragments suitable for use as immunogens to raise anti-1722, 10280, 59917, 85553, 10653, 9235, 21668, 17794, 2210, 6169, 10102, 21061, 17662, 1468, 12282, 6350, 9035, 1820, 23652, 7301, 8925, 8701, 3533, 9462, 9123, 12788, 17729, 65552, 1261, 21476, 33770, 9380, 2569654, 33556, 53656, 44143, 32612, 10671, 261, 44570, 41922, 2552, 2417, 19319, 43969, 8921, 8993, 955, 32345, 966, 1920, 17318, 1510, 14180, 26005, 554, 16408, 42028, 112091, 13886, 13942, 1673, 54946 or 2419 antibodies. In one embodiment, native 1722, 10280, 59917, 85553, 10653, 9235, 21668, 17794, 2210, 6169, 10102, 21061, 17662, 1468, 12282, 6350, 9035, 1820, 23652, 7301, 8925, 8701, 3533, 9462, 9123, 12788, 17729, 65552, 1261, 21476, 33770, 9380, 2569654, 33556, 53656, 44143, 32612, 10671, 261, 44570, 41922, 2552, 2417, 19319, 43969, 8921, 8993, 955, 32345, 966, 1920, 17318, 1510, 14180, 26005, 554, 16408, 42028, 112091, 13886, 13942, 1673, 54946 or 2419 proteins can be isolated from cells or tissue sources by an appropriate purification scheme using standard protein purification techniques. In another embodiment, 1722, 10280, 59917, 85553, 10653, 9235, 21668, 17794, 2210, 6169, 10102, 21061, 17662, 1468, 12282, 6350, 9035, 1820, 23652, 7301, 8925, 8701, 3533, 9462, 9123, 12788, 17729, 65552, 1261, 21476, 33770, 9380, 2569654, 33556, 53656, 44143, 32612, 10671, 261, 44570, 41922, 2552, 2417, 19319, 43969, 8921, 8993, 955, 32345, 966, 1920, 17318, 1510, 14180, 26005, 554, 16408, 42028, 112091, 13886, 13942, 1673, 54946 or 2419 proteins are produced by recombinant DNA techniques. Alternative to recombinant expression, a 1722, 10280, 59917, 85553, 10653, 9235, 21668, 17794, 2210, 6169, 10102, 21061, 17662, 1468, 12282, 6350, 9035, 1820, 23652, 7301, 8925, 8701, 3533, 9462, 9123, 12788, 17729, 65552, 1261, 21476, 33770, 9380, 2569654, 33556, 53656, 44143, 32612, 10671, 261, 44570, 41922, 2552, 2417, 19319, 43969, 8921, 8993, 955, 32345, 966, 1920, 17318, 1510, 14180, 26005, 554, 16408, 42028, 112091, 13886, 13942, 1673, 54946 or 2419 protein or polypeptide can be synthesized chemically using standard peptide synthesis techniques.

[0471] As used herein, a “biologically active portion” of a 1722, 10280, 59917, 85553, 10653, 9235, 21668, 17794, 2210, 6169, 10102, 21061, 17662, 1468, 12282, 6350, 9035, 1820, 23652, 7301, 8925, 8701, 3533, 9462, 9123, 12788, 17729, 65552, 1261, 21476, 33770, 9380, 2569654, 33556, 53656, 44143, 32612, 10671, 261, 44570, 41922, 2552, 2417, 19319, 43969, 8921, 8993, 955, 32345, 966, 1920, 17318, 1510, 14180, 26005, 554, 16408, 42028, 112091, 13886, 13942, 1673, 54946 or 2419 protein includes a fragment of a 1722, 10280, 59917, 85553, 10653, 9235, 21668, 17794, 2210, 6169, 10102, 21061, 17662, 1468, 12282, 6350, 9035, 1820, 23652, 7301, 8925, 8701, 3533, 9462, 9123, 12788, 17729, 65552, 1261, 21476, 33770, 9380, 2569654, 33556, 53656, 44143, 32612, 10671, 261, 44570, 41922, 2552, 2417, 19319, 43969, 8921, 8993, 955, 32345, 966, 1920, 17318, 1510, 14180, 26005, 554, 16408, 42028, 112091, 13886, 13942, 1673, 54946 or 2419 protein having a 1722, 10280, 59917, 85553, 10653, 9235, 21668, 17794, 2210, 6169, 10102, 21061, 17662, 1468, 12282, 6350, 9035, 1820, 23652, 7301, 8925, 8701, 3533, 9462, 9123, 12788, 17729, 65552, 1261, 21476, 33770, 9380, 2569654, 33556, 53656, 44143, 32612, 10671, 261, 44570, 41922, 2552, 2417, 19319, 43969, 8921, 8993, 955, 32345, 966, 1920, 17318, 1510, 14180, 26005, 554, 16408, 42028, 112091, 13886, 13942, 1673, 54946 or 2419 activity. Biologically active portions of a 1722, 10280, 59917, 85553, 10653, 9235, 21668, 17794, 2210, 6169, 10102, 21061, 17662, 1468, 12282, 6350, 9035, 1820, 23652, 7301, 8925, 8701, 3533, 9462, 9123, 12788, 17729, 65552, 1261, 21476, 33770, 9380, 2569654, 33556, 53656, 44143, 32612, 10671, 261, 44570, 41922, 2552, 2417, 19319, 43969, 8921, 8993, 955, 32345, 966, 1920, 17318, 1510, 14180, 26005, 554, 16408, 42028, 112091, 13886, 13942, 1673, 54946 or 2419 protein include peptides comprising amino acid sequences sufficiently identical to or derived from the amino acid sequence of the 1722, 10280, 59917, 85553, 10653, 9235, 21668, 17794, 2210, 6169, 10102, 21061, 17662, 1468, 12282, 6350, 9035, 1820, 23652, 7301, 8925, 8701, 3533, 9462, 9123, 12788, 17729, 65552, 1261, 21476, 33770, 9380, 2569654, 33556, 53656, 44143, 32612, 10671, 261, 44570, 41922, 2552, 2417, 19319, 43969, 8921, 8993, 955, 32345, 966, 1920, 17318, 1510, 14180, 26005, 554, 16408, 42028, 112091, 13886, 13942, 1673, 54946 or 2419 protein, e.g., the amino acid sequence shown in SEQ ID NO:2, 4, 6, 8, 10, 12, 14, 16, 18, 20, 22, 24, 26, 28, 30, 32, 34, 36, 38, 40, 42, 44, 46, 48, 50, 52, 54, 56, 58, 60, 62, 64, 66, 68, 70, 72, 74, 76, 78, 80, 82, 84, 86, 88, 90, 92, 94, 96, 98, 100, 102, 104, 106, 108, 110, 112, 114, 116, 118, 120, 122, 124, 126 or 128, which include fewer amino acids than the full length 1722, 10280, 59917, 85553, 10653, 9235, 21668, 17794, 2210, 6169, 10102, 21061, 17662, 1468, 12282, 6350, 9035, 1820, 23652, 7301, 8925, 8701, 3533, 9462, 9123, 12788, 17729, 65552, 1261, 21476, 33770, 9380, 2569654, 33556, 53656, 44143, 32612, 10671, 261, 44570, 41922, 2552, 2417, 19319, 43969, 8921, 8993, 955, 32345, 966, 1920, 17318, 1510, 14180, 26005, 554, 16408, 42028, 112091, 13886, 13942, 1673, 54946 or 2419 proteins, and exhibit at least one activity of a 1722, 10280, 59917, 85553, 10653, 9235, 21668, 17794, 2210, 6169, 10102, 21061, 17662, 1468, 12282, 6350, 9035, 1820, 23652, 7301, 8925, 8701, 3533, 9462, 9123, 12788, 17729, 65552, 1261, 21476, 33770, 9380, 2569654, 33556, 53656, 44143, 32612, 10671, 261, 44570, 41922, 2552, 2417, 19319, 43969, 8921, 8993, 955, 32345, 966, 1920, 17318, 1510, 14180, 26005, 554, 16408, 42028, 112091, 13886, 13942, 1673, 54946 or 2419 protein. Typically, biologically active portions comprise a domain or motif with at least one activity of the 1722, 10280, 59917, 85553, 10653, 9235, 21668, 17794, 2210, 6169, 10102, 21061, 17662, 1468, 12282, 6350, 9035, 1820, 23652, 7301, 8925, 8701, 3533, 9462, 9123, 12788, 17729, 65552, 1261, 21476, 33770, 9380, 2569654, 33556, 53656, 44143, 32612, 10671, 261, 44570, 41922, 2552, 2417, 19319, 43969, 8921, 8993, 955, 32345, 966, 1920, 17318, 1510, 14180, 26005, 554, 16408, 42028, 112091, 13886, 13942, 1673, 54946 or 2419 protein (e.g., the N-terminal region of the 1722, 10280, 59917, 85553, 10653, 9235, 21668, 17794, 2210, 6169, 10102, 21061, 17662, 1468, 12282, 6350, 9035, 1820, 23652, 7301, 8925, 8701, 3533, 9462, 9123, 12788, 17729, 65552, 1261, 21476, 33770, 9380, 2569654, 33556, 53656, 44143, 32612, 10671, 261, 44570, 41922, 2552, 2417, 19319, 43969, 8921, 8993, 955, 32345, 966, 1920, 17318, 1510, 14180, 26005, 554, 16408, 42028, 112091, 13886, 13942, 1673, 54946 or 2419 protein that is believed to be involved in the regulation of apoptotic activity). A biologically active portion of a 1722, 10280, 59917, 85553, 10653, 9235, 21668, 17794, 2210, 6169, 10102, 21061, 17662, 1468, 12282, 6350, 9035, 1820, 23652, 7301, 8925, 8701, 3533, 9462, 9123, 12788, 17729, 65552, 1261, 21476, 33770, 9380, 2569654, 33556, 53656, 44143, 32612, 10671, 261, 44570, 41922, 2552, 2417, 19319, 43969, 8921, 8993, 955, 32345, 966, 1920, 17318, 1510, 14180, 26005, 554, 16408, 42028, 112091, 13886, 13942, 1673, 54946 or 2419 protein can be a polypeptide which is, for example, 25, 50, 75, 100, 125, 150, 175, 200, 250, 300 or more amino acids in length. Biologically active portions of a 1722, 10280, 59917, 85553, 10653, 9235, 21668, 17794, 2210, 6169, 10102, 21061, 17662, 1468, 12282, 6350, 9035, 1820, 23652, 7301, 8925, 8701, 3533, 9462, 9123, 12788, 17729, 65552, 1261, 21476, 33770, 9380, 2569654, 33556, 53656, 44143, 32612, 10671, 261, 44570, 41922, 2552, 2417, 19319, 43969, 8921, 8993, 955, 32345, 966, 1920, 17318, 1510, 14180, 26005, 554, 16408, 42028, 112091, 13886, 13942, 1673, 54946 or 2419 protein can be used as targets for developing agents which modulate a 1722, 10280, 59917, 85553, 10653, 9235, 21668, 17794, 2210, 6169, 10102, 21061, 17662, 1468, 12282, 6350, 9035, 1820, 23652, 7301, 8925, 8701, 3533, 9462, 9123, 12788, 17729, 65552, 1261, 21476, 33770, 9380, 2569654, 33556, 53656, 44143, 32612, 10671, 261, 44570, 41922, 2552, 2417, 19319, 43969, 8921, 8993, 955, 32345, 966, 1920, 17318, 1510, 14180, 26005, 554, 16408, 42028, 112091, 13886, 13942, 1673, 54946 or 2419 activity.

[0472] In a preferred embodiment, the 1722, 10280, 59917, 85553, 10653, 9235, 21668, 17794, 2210, 6169, 10102, 21061, 17662, 1468, 12282, 6350, 9035, 1820, 23652, 7301, 8925, 8701, 3533, 9462, 9123, 12788, 17729, 65552, 1261, 21476, 33770, 9380, 2569654, 33556, 53656, 44143, 32612, 10671, 261, 44570, 41922, 2552, 2417, 19319, 43969, 8921, 8993, 955, 32345, 966, 1920, 17318, 1510, 14180, 26005, 554, 16408, 42028, 112091, 13886, 13942, 1673, 54946 or 2419 protein used in the methods of the invention has an amino acid sequence shown in SEQ ID NO:2, 4, 6, 8, 10, 12, 14, 16, 18, 20, 22, 24, 26, 28, 30, 32, 34, 36, 38, 40, 42, 44, 46, 48, 50, 52, 54, 56, 58, 60, 62, 64, 66, 68, 70, 72, 74, 76, 78, 80, 82, 84, 86, 88, 90, 92, 94, 96, 98, 100, 102, 104, 106, 108, 110, 112, 114, 116, 118, 120, 122, 124, 126 or 128. In other embodiments, the 1722, 10280, 59917, 85553, 10653, 9235, 21668, 17794, 2210, 6169, 10102, 21061, 17662, 1468, 12282, 6350, 9035, 1820, 23652, 7301, 8925, 8701, 3533, 9462, 9123, 12788, 17729, 65552, 1261, 21476, 33770, 9380, 2569654, 33556, 53656, 44143, 32612, 10671, 261, 44570, 41922, 2552, 2417, 19319, 43969, 8921, 8993, 955, 32345, 966, 1920, 17318, 1510, 14180, 26005, 554, 16408, 42028, 112091, 13886, 13942, 1673, 54946 or 2419 protein is substantially identical to SEQ ID NO:2, 4, 6, 8, 10, 12, 14, 16, 18, 20, 22, 24, 26, 28, 30, 32, 34, 36, 38, 40, 42, 44, 46, 48, 50, 52, 54, 56, 58, 60, 62, 64, 66, 68, 70, 72, 74, 76, 78, 80, 82, 84, 86, 88, 90, 92, 94, 96, 98, 100, 102, 104, 106, 108, 110, 112, 114, 116, 118, 120, 122, 124, 126 or 128 and retains the functional activity of the protein of SEQ ID NO:2, 4, 6, 8, 10, 12, 14, 16, 18, 20, 22, 24, 26, 28, 30, 32, 34, 36, 38, 40, 42, 44, 46, 48, 50, 52, 54, 56, 58, 60, 62, 64, 66, 68, 70, 72, 74, 76, 78, 80, 82, 84, 86, 88, 90, 92, 94, 96, 98, 100, 102, 104, 106, 108, 110, 112, 114, 116, 118, 120, 122, 124, 126 or 128, yet differs in amino acid sequence due to natural allelic variation or mutagenesis, as described in detail in subsection V above. Accordingly, in another embodiment, the 1722, 10280, 59917, 85553, 10653, 9235, 21668, 17794, 2210, 6169, 10102, 21061, 17662, 1468, 12282, 6350, 9035, 1820, 23652, 7301, 8925, 8701, 3533, 9462, 9123, 12788, 17729, 65552, 1261, 21476, 33770, 9380, 2569654, 33556, 53656, 44143, 32612, 10671, 261, 44570, 41922, 2552, 2417, 19319, 43969, 8921, 8993, 955, 32345, 966, 1920, 17318, 1510, 14180, 26005, 554, 16408, 42028, 112091, 13886, 13942, 1673, 54946 or 2419 protein used in the methods of the invention is a protein which comprises an amino acid sequence at least about 50%, 55%, 60%, 65%, 70%, 75%, 80%, 85%, 90%, 95%, 96%, 97%, 98%, 99% or more identical to SEQ ID NO:2, 4, 6, 8, 10, 12, 14, 16, 18, 20, 22, 24, 26, 28, 30, 32, 34, 36, 38, 40, 42, 44, 46, 48, 50, 52, 54, 56, 58, 60, 62, 64, 66, 68, 70, 72, 74, 76, 78, 80, 82, 84, 86, 88, 90, 92, 94, 96, 98, 100, 102, 104, 106, 108, 110, 112, 114, 116, 118, 120, 122, 124, 126 or 128.

[0473] To determine the percent identity of two amino acid sequences or of two nucleic acid sequences, the sequences are aligned for optimal comparison purposes (e.g., gaps can be introduced in one or both of a first and a second amino acid or nucleic acid sequence for optimal alignment and non-identical sequences can be disregarded for comparison purposes). In a preferred embodiment, the length of a reference sequence aligned for comparison purposes is at least 30%, preferably at least 40%, more preferably at least 50%, even more preferably at least 60%, and even more preferably at least 70%, 80%, or 90% of the length of the reference sequence (e.g., when aligning a second sequence to the 1722, 10280, 59917, 85553, 10653, 9235, 21668, 17794, 2210, 6169, 10102, 21061, 17662, 1468, 12282, 6350, 9035, 1820, 23652, 7301, 8925, 8701, 3533, 9462, 9123, 12788, 17729, 65552, 1261, 21476, 33770, 9380, 2569654, 33556, 53656, 44143, 32612, 10671, 261, 44570, 41922, 2552, 2417, 19319, 43969, 8921, 8993, 955, 32345, 966, 1920, 17318, 1510, 14180, 26005, 554, 16408, 42028, 112091, 13886, 13942, 1673, 54946 or 2419 amino acid sequence of SEQ ID NO:2, 4, 6, 8, 10, 12, 14, 16, 18, 20, 22, 24, 26, 28, 30, 32, 34, 36, 38, 40, 42, 44, 46, 48, 50, 52, 54, 56, 58, 60, 62, 64, 66, 68, 70, 72, 74, 76, 78, 80, 82, 84, 86, 88, 90, 92, 94, 96, 98, 100, 102, 104, 106, 108, 110, 112, 114, 116, 118, 120, 122, 124, 126 or 128, having 500 amino acid residues, at least 75, preferably at least 150, more preferably at least 225, even more preferably at least 300, and even more preferably at least 400 or more amino acid residues are aligned). The amino acid residues or nucleotides at corresponding amino acid positions or nucleotide positions are then compared. When a position in the first sequence is occupied by the same amino acid residue or nucleotide as the corresponding position in the second sequence, then the molecules are identical at that position (as used herein amino acid or nucleic acid “identity” is equivalent to amino acid or nucleic acid “homology”). The percent identity between the two sequences is a function of the number of identical positions shared by the sequences, taking into account the number of gaps, and the length of each gap, which need to be introduced for optimal alignment of the two sequences.

[0474] The comparison of sequences and determination of percent identity between two sequences can be accomplished using a mathematical algorithm. In a preferred embodiment, the percent identity between two amino acid sequences is determined using the Needleman and Wunsch (J. Mol. Biol. 48:444-453 (1970)) algorithm which has been incorporated into the GAP program in the GCG software package, using either a Blosum 62 matrix or a PAM250 matrix, and a gap weight of 16, 14, 12, 10, 8, 6, or 4 and a length weight of 1, 2, 3, 4, 5, or 6. In yet another preferred embodiment, the percent identity between two nucleotide sequences is determined using the GAP program in the GCG software package, using a NWSgapdna.CMP matrix and a gap weight of 40, 50, 60, 70, or 80 and a length weight of 1, 2, 3, 4, 5, or 6. In another embodiment, the percent identity between two amino acid or nucleotide sequences is determined using the algorithm of E. Meyers and W. Miller (Comput. Appl. Biosci. 4:11-17 (1988)) which has been incorporated into the ALIGN program (version 2.0 or 2.0U), using a PAM120 weight residue table, a gap length penalty of 12 and a gap penalty of 4.

[0475] The methods of the invention may also use 1722, 10280, 59917, 85553, 10653, 9235, 21668, 17794, 2210, 6169, 10102, 21061, 17662, 1468, 12282, 6350, 9035, 1820, 23652, 7301, 8925, 8701, 3533, 9462, 9123, 12788, 17729, 65552, 1261, 21476, 33770, 9380, 2569654, 33556, 53656, 44143, 32612, 10671, 261, 44570, 41922, 2552, 2417, 19319, 43969, 8921, 8993, 955, 32345, 966, 1920, 17318, 1510, 14180, 26005, 554, 16408, 42028, 112091, 13886, 13942, 1673, 54946 or 2419 chimeric or fusion proteins. As used herein, a 1722, 10280, 59917, 85553, 10653, 9235, 21668, 17794, 2210, 6169, 10102, 21061, 17662, 1468, 12282, 6350, 9035, 1820, 23652, 7301, 8925, 8701, 3533, 9462, 9123, 12788, 17729, 65552, 1261, 21476, 33770, 9380, 2569654, 33556, 53656, 44143, 32612, 10671, 261, 44570, 41922, 2552, 2417, 19319, 43969, 8921, 8993, 955, 32345, 966, 1920, 17318, 1510, 14180, 26005, 554, 16408, 42028, 112091, 13886, 13942, 1673, 54946 or 2419 “chimeric protein” or “fusion protein” comprises a 1722, 10280, 59917, 85553, 10653, 9235, 21668, 17794, 2210, 6169, 10102, 21061, 17662, 1468, 12282, 6350, 9035, 1820, 23652, 7301, 8925, 8701, 3533, 9462, 9123, 12788, 17729, 65552, 1261, 21476, 33770, 9380, 2569654, 33556, 53656, 44143, 32612, 10671, 261, 44570, 41922, 2552, 2417, 19319, 43969, 8921, 8993, 955, 32345, 966, 1920, 17318, 1510, 14180, 26005, 554, 16408, 42028, 112091, 13886, 13942, 1673, 54946 or 2419 polypeptide operatively linked to a non-1722, 10280, 59917, 85553, 10653, 9235, 21668, 17794, 2210, 6169, 10102, 21061, 17662, 1468, 12282, 6350, 9035, 1820, 23652, 7301, 8925, 8701, 3533, 9462, 9123, 12788, 17729, 65552, 1261, 21476, 33770, 9380, 2569654, 33556, 53656, 44143, 32612, 10671, 261, 44570, 41922, 2552, 2417, 19319, 43969, 8921, 8993, 955, 32345, 966, 1920, 17318, 1510, 14180, 26005, 554, 16408, 42028, 112091, 13886, 13942, 1673, 54946 or 2419 polypeptide. An “1722, 10280, 59917, 85553, 10653, 9235, 21668, 17794, 2210, 6169, 10102, 21061, 17662, 1468, 12282, 6350, 9035, 1820, 23652, 7301, 8925, 8701, 3533, 9462, 9123, 12788, 17729, 65552, 1261, 21476, 33770, 9380, 2569654, 33556, 53656, 44143, 32612, 10671, 261, 44570, 41922, 2552, 2417, 19319, 43969, 8921, 8993, 955, 32345, 966, 1920, 17318, 1510, 14180, 26005, 554, 16408, 42028, 112091, 13886, 13942, 1673, 54946 or 2419 polypeptide” refers to a polypeptide having an amino acid sequence corresponding to a 1722, 10280, 59917, 85553, 10653, 9235, 21668, 17794, 2210, 6169, 10102, 21061, 17662, 1468, 12282, 6350, 9035, 1820, 23652, 7301, 8925, 8701, 3533, 9462, 9123, 12788, 17729, 65552, 1261, 21476, 33770, 9380, 2569654, 33556, 53656, 44143, 32612, 10671, 261, 44570, 41922, 2552, 2417, 19319, 43969, 8921, 8993, 955, 32345, 966, 1920, 17318, 1510, 14180, 26005, 554, 16408, 42028, 112091, 13886, 13942, 1673, 54946 or 2419 molecule, whereas a “non-1722, 10280, 59917, 85553, 10653, 9235, 21668, 17794, 2210, 6169, 10102, 21061, 17662, 1468, 12282, 6350, 9035, 1820, 23652, 7301, 8925, 8701, 3533, 9462, 9123, 12788, 17729, 65552, 1261, 21476, 33770, 9380, 2569654, 33556, 53656, 44143, 32612, 10671, 261, 44570, 41922, 2552, 2417, 19319, 43969, 8921, 8993, 955, 32345, 966, 1920, 17318, 1510, 14180, 26005, 554, 16408, 42028, 112091, 13886, 13942, 1673, 54946 or 2419 polypeptide” refers to a polypeptide having an amino acid sequence corresponding to a protein which is not substantially homologous to the 1722, 10280, 59917, 85553, 10653, 9235, 21668, 17794, 2210, 6169, 10102, 21061, 17662, 1468, 12282, 6350, 9035, 1820, 23652, 7301, 8925, 8701, 3533, 9462, 9123, 12788, 17729, 65552, 1261, 21476, 33770, 9380, 2569654, 33556, 53656, 44143, 32612, 10671, 261, 44570, 41922, 2552, 2417, 19319, 43969, 8921, 8993, 955, 32345, 966, 1920, 17318, 1510, 14180, 26005, 554, 16408, 42028, 112091, 13886, 13942, 1673, 54946 or 2419 protein, e.g., a protein which is different from the 1722, 10280, 59917, 85553, 10653, 9235, 21668, 17794, 2210, 6169, 10102, 21061, 17662, 1468, 12282, 6350, 9035, 1820, 23652, 7301, 8925, 8701, 3533, 9462, 9123, 12788, 17729, 65552, 1261, 21476, 33770, 9380, 2569654, 33556, 53656, 44143, 32612, 10671, 261, 44570, 41922, 2552, 2417, 19319, 43969, 8921, 8993, 955, 32345, 966, 1920, 17318, 1510, 14180, 26005, 554, 16408, 42028, 112091, 13886, 13942, 1673, 54946 or 2419 protein and which is derived from the same or a different organism. Within a 1722, 10280, 59917, 85553, 10653, 9235, 21668, 17794, 2210, 6169, 10102, 21061, 17662, 1468, 12282, 6350, 9035, 1820, 23652, 7301, 8925, 8701, 3533, 9462, 9123, 12788, 17729, 65552, 1261, 21476, 33770, 9380, 2569654, 33556, 53656, 44143, 32612, 10671, 261, 44570, 41922, 2552, 2417, 19319, 43969, 8921, 8993, 955, 32345, 966, 1920, 17318, 1510, 14180, 26005, 554, 16408, 42028, 112091, 13886, 13942, 1673, 54946 or 2419 fusion protein the 1722, 10280, 59917, 85553, 10653, 9235, 21668, 17794, 2210, 6169, 10102, 21061, 17662, 1468, 12282, 6350, 9035, 1820, 23652, 7301, 8925, 8701, 3533, 9462, 9123, 12788, 17729, 65552, 1261, 21476, 33770, 9380, 2569654, 33556, 53656, 44143, 32612, 10671, 261, 44570, 41922, 2552, 2417, 19319, 43969, 8921, 8993, 955, 32345, 966, 1920, 17318, 1510, 14180, 26005, 554, 16408, 42028, 112091, 13886, 13942, 1673, 54946 or 2419 polypeptide can correspond to all or a portion of a 1722, 10280, 59917, 85553, 10653, 9235, 21668, 17794, 2210, 6169, 10102, 21061, 17662, 1468, 12282, 6350, 9035, 1820, 23652, 7301, 8925, 8701, 3533, 9462, 9123, 12788, 17729, 65552, 1261, 21476, 33770, 9380, 2569654, 33556, 53656, 44143, 32612, 10671, 261, 44570, 41922, 2552, 2417, 19319, 43969, 8921, 8993, 955, 32345, 966, 1920, 17318, 1510, 14180, 26005, 554, 16408, 42028, 112091, 13886, 13942, 1673, 54946 or 2419 protein. In a preferred embodiment, a 1722, 10280, 59917, 85553, 10653, 9235, 21668, 17794, 2210, 6169, 10102, 21061, 17662, 1468, 12282, 6350, 9035, 1820, 23652, 7301, 8925, 8701, 3533, 9462, 9123, 12788, 17729, 65552, 1261, 21476, 33770, 9380, 2569654, 33556, 53656, 44143, 32612, 10671, 261, 44570, 41922, 2552, 2417, 19319, 43969, 8921, 8993, 955, 32345, 966, 1920, 17318, 1510, 14180, 26005, 554, 16408, 42028, 112091, 13886, 13942, 1673, 54946 or 2419 fusion protein comprises at least one biologically active portion of a 1722, 10280, 59917, 85553, 10653, 9235, 21668, 17794, 2210, 6169, 10102, 21061, 17662, 1468, 12282, 6350, 9035, 1820, 23652, 7301, 8925, 8701, 3533, 9462, 9123, 12788, 17729, 65552, 1261, 21476, 33770, 9380, 2569654, 33556, 53656, 44143, 32612, 10671, 261, 44570, 41922, 2552, 2417, 19319, 43969, 8921, 8993, 955, 32345, 966, 1920, 17318, 1510, 14180, 26005, 554, 16408, 42028, 112091, 13886, 13942, 1673, 54946 or 2419 protein. In another preferred embodiment, a 1722, 10280, 59917, 85553, 10653, 9235, 21668, 17794, 2210, 6169, 10102, 21061, 17662, 1468, 12282, 6350, 9035, 1820, 23652, 7301, 8925, 8701, 3533, 9462, 9123, 12788, 17729, 65552, 1261, 21476, 33770, 9380, 2569654, 33556, 53656, 44143, 32612, 10671, 261, 44570, 41922, 2552, 2417, 19319, 43969, 8921, 8993, 955, 32345, 966, 1920, 17318, 1510, 14180, 26005, 554, 16408, 42028, 112091, 13886, 13942, 1673, 54946 or 2419 fusion protein comprises at least two biologically active portions of a 1722, 10280, 59917, 85553, 10653, 9235, 21668, 17794, 2210, 6169, 10102, 21061, 17662, 1468, 12282, 6350, 9035, 1820, 23652, 7301, 8925, 8701, 3533, 9462, 9123, 12788, 17729, 65552, 1261, 21476, 33770, 9380, 2569654, 33556, 53656, 44143, 32612, 10671, 261, 44570, 41922, 2552, 2417, 19319, 43969, 8921, 8993, 955, 32345, 966, 1920, 17318, 1510, 14180, 26005, 554, 16408, 42028, 112091, 13886, 13942, 1673, 54946 or 2419 protein. Within the fusion protein, the term “operatively linked” is intended to indicate that the 1722, 10280, 59917, 85553, 10653, 9235, 21668, 17794, 2210, 6169, 10102, 21061, 17662, 1468, 12282, 6350, 9035, 1820, 23652, 7301, 8925, 8701, 3533, 9462, 9123, 12788, 17729, 65552, 1261, 21476, 33770, 9380, 2569654, 33556, 53656, 44143, 32612, 10671, 261, 44570, 41922, 2552, 2417, 19319, 43969, 8921, 8993, 955, 32345, 966, 1920, 17318, 1510, 14180, 26005, 554, 16408, 42028, 112091, 13886, 13942, 1673, 54946 or 2419 polypeptide and the non-1722, 10280, 59917, 85553, 10653, 9235, 21668, 17794, 2210, 6169, 10102, 21061, 17662, 1468, 12282, 6350, 9035, 1820, 23652, 7301, 8925, 8701, 3533, 9462, 9123, 12788, 17729, 65552, 1261, 21476, 33770, 9380, 2569654, 33556, 53656, 44143, 32612, 10671, 261, 44570, 41922, 2552, 2417, 19319, 43969, 8921, 8993, 955, 32345, 966, 1920, 17318, 1510, 14180, 26005, 554, 16408, 42028, 112091, 13886, 13942, 1673, 54946 or 2419 polypeptide are fused in-frame to each other. The non-1722, 10280, 59917, 85553, 10653, 9235, 21668, 17794, 2210, 6169, 10102, 21061, 17662, 1468, 12282, 6350, 9035, 1820, 23652, 7301, 8925, 8701, 3533, 9462, 9123, 12788, 17729, 65552, 1261, 21476, 33770, 9380, 2569654, 33556, 53656, 44143, 32612, 10671, 261, 44570, 41922, 2552, 2417, 19319, 43969, 8921, 8993, 955, 32345, 966, 1920, 17318, 1510, 14180, 26005, 554, 16408, 42028, 112091, 13886, 13942, 1673, 54946 or 2419 polypeptide can be fused to the N-terminus or C-terminus of the 1722, 10280, 59917, 85553, 10653, 9235, 21668, 17794, 2210, 6169, 10102, 21061, 17662, 1468, 12282, 6350, 9035, 1820, 23652, 7301, 8925, 8701, 3533, 9462, 9123, 12788, 17729, 65552, 1261, 21476, 33770, 9380, 2569654, 33556, 53656, 44143, 32612, 10671, 261, 44570, 41922, 2552, 2417, 19319, 43969, 8921, 8993, 955, 32345, 966, 1920, 17318, 1510, 14180, 26005, 554, 16408, 42028, 112091, 13886, 13942, 1673, 54946 or 2419 polypeptide.

[0476] For example, in one embodiment, the fusion protein is a GST-1722, 10280, 59917, 85553, 10653, 9235, 21668, 17794, 2210, 6169, 10102, 21061, 17662, 1468, 12282, 6350, 9035, 1820, 23652, 7301, 8925, 8701, 3533, 9462, 9123, 12788, 17729, 65552, 1261, 21476, 33770, 9380, 2569654, 33556, 53656, 44143, 32612, 10671, 261, 44570, 41922, 2552, 2417, 19319, 43969, 8921, 8993, 955, 32345, 966, 1920, 17318, 1510, 14180, 26005, 554, 16408, 42028, 112091, 13886, 13942, 1673, 54946 or 2419 fusion protein in which the 1722, 10280, 59917, 85553, 10653, 9235, 21668, 17794, 2210, 6169, 10102, 21061, 17662, 1468, 12282, 6350, 9035, 1820, 23652, 7301, 8925, 8701, 3533, 9462, 9123, 12788, 17729, 65552, 1261, 21476, 33770, 9380, 2569654, 33556, 53656, 44143, 32612, 10671, 261, 44570, 41922, 2552, 2417, 19319, 43969, 8921, 8993, 955, 32345, 966, 1920, 17318, 1510, 14180, 26005, 554, 16408, 42028, 112091, 13886, 13942, 1673, 54946 or 2419 sequences are fused to the C-terminus of the GST sequences. Such fusion proteins can facilitate the purification of recombinant 1722, 10280, 59917, 85553, 10653, 9235, 21668, 17794, 2210, 6169, 10102, 21061, 17662, 1468, 12282, 6350, 9035, 1820, 23652, 7301, 8925, 8701, 3533, 9462, 9123, 12788, 17729, 65552, 1261, 21476, 33770, 9380, 2569654, 33556, 53656, 44143, 32612, 10671, 261, 44570, 41922, 2552, 2417, 19319, 43969, 8921, 8993, 955, 32345, 966, 1920, 17318, 1510, 14180, 26005, 554, 16408, 42028, 112091, 13886, 13942, 1673, 54946 or 2419.

[0477] In another embodiment, this fusion protein is a 1722, 10280, 59917, 85553, 10653, 9235, 21668, 17794, 2210, 6169, 10102, 21061, 17662, 1468, 12282, 6350, 9035, 1820, 23652, 7301, 8925, 8701, 3533, 9462, 9123, 12788, 17729, 65552, 1261, 21476, 33770, 9380, 2569654, 33556, 53656, 44143, 32612, 10671, 261, 44570, 41922, 2552, 2417, 19319, 43969, 8921, 8993, 955, 32345, 966, 1920, 17318, 1510, 14180, 26005, 554, 16408, 42028, 112091, 13886, 13942, 1673, 54946 or 2419 protein containing a heterologous signal sequence at its N-terminus. In certain host cells (e.g., mammalian host cells), expression and/or secretion of 1722, 10280, 59917, 85553, 10653, 9235, 21668, 17794, 2210, 6169, 10102, 21061, 17662, 1468, 12282, 6350, 9035, 1820, 23652, 7301, 8925, 8701, 3533, 9462, 9123, 12788, 17729, 65552, 1261, 21476, 33770, 9380, 2569654, 33556, 53656, 44143, 32612, 10671, 261, 44570, 41922, 2552, 2417, 19319, 43969, 8921, 8993, 955, 32345, 966, 1920, 17318, 1510, 14180, 26005, 554, 16408, 42028, 112091, 13886, 13942, 1673, 54946 or 2419 can be increased through use of a heterologous signal sequence.

[0478] The 1722, 10280, 59917, 85553, 10653, 9235, 21668, 17794, 2210, 6169, 10102, 21061, 17662, 1468, 12282, 6350, 9035, 1820, 23652, 7301, 8925, 8701, 3533, 9462, 9123, 12788, 17729, 65552, 1261, 21476, 33770, 9380, 2569654, 33556, 53656, 44143, 32612, 10671, 261, 44570, 41922, 2552, 2417, 19319, 43969, 8921, 8993, 955, 32345, 966, 1920, 17318, 1510, 14180, 26005, 554, 16408, 42028, 112091, 13886, 13942, 1673, 54946 or 2419 fusion proteins used in the methods of the invention can be incorporated into pharmaceutical compositions and administered to a subject in vivo. The 1722, 10280, 59917, 85553, 10653, 9235, 21668, 17794, 2210, 6169, 10102, 21061, 17662, 1468, 12282, 6350, 9035, 1820, 23652, 7301, 8925, 8701, 3533, 9462, 9123, 12788, 17729, 65552, 1261, 21476, 33770, 9380, 2569654, 33556, 53656, 44143, 32612, 10671, 261, 44570, 41922, 2552, 2417, 19319, 43969, 8921, 8993, 955, 32345, 966, 1920, 17318, 1510, 14180, 26005, 554, 16408, 42028, 112091, 13886, 13942, 1673, 54946 or 2419 fusion proteins can be used to affect the bioavailability of a 1722, 10280, 59917, 85553, 10653, 9235, 21668, 17794, 2210, 6169, 10102, 21061, 17662, 1468, 12282, 6350, 9035, 1820, 23652, 7301, 8925, 8701, 3533, 9462, 9123, 12788, 17729, 65552, 1261, 21476, 33770, 9380, 2569654, 33556, 53656, 44143, 32612, 10671, 261, 44570, 41922, 2552, 2417, 19319, 43969, 8921, 8993, 955, 32345, 966, 1920, 17318, 1510, 14180, 26005, 554, 16408, 42028, 112091, 13886, 13942, 1673, 54946 or 2419 substrate. Use of 1722, 10280, 59917, 85553, 10653, 9235, 21668, 17794, 2210, 6169, 10102, 21061, 17662, 1468, 12282, 6350, 9035, 1820, 23652, 7301, 8925, 8701, 3533, 9462, 9123, 12788, 17729, 65552, 1261, 21476, 33770, 9380, 2569654, 33556, 53656, 44143, 32612, 10671, 261, 44570, 41922, 2552, 2417, 19319, 43969, 8921, 8993, 955, 32345, 966, 1920, 17318, 1510, 14180, 26005, 554, 16408, 42028, 112091, 13886, 13942, 1673, 54946 or 2419 fusion proteins may be useful therapeutically for the treatment of disorders caused by, for example, (i) aberrant modification or mutation of a gene encoding a 1722, 10280, 59917, 85553, 10653, 9235, 21668, 17794, 2210, 6169, 10102, 21061, 17662, 1468, 12282, 6350, 9035, 1820, 23652, 7301, 8925, 8701, 3533, 9462, 9123, 12788, 17729, 65552, 1261, 21476, 33770, 9380, 2569654, 33556, 53656, 44143, 32612, 10671, 261, 44570, 41922, 2552, 2417, 19319, 43969, 8921, 8993, 955, 32345, 966, 1920, 17318, 1510, 14180, 26005, 554, 16408, 42028, 112091, 13886, 13942, 1673, 54946 or 2419 protein; (ii) mis-regulation of the 1722, 10280, 59917, 85553, 10653, 9235, 21668, 17794, 2210, 6169, 10102, 21061, 17662, 1468, 12282, 6350, 9035, 1820, 23652, 7301, 8925, 8701, 3533, 9462, 9123, 12788, 17729, 65552, 1261, 21476, 33770, 9380, 2569654, 33556, 53656, 44143, 32612, 10671, 261, 44570, 41922, 2552, 2417, 19319, 43969, 8921, 8993, 955, 32345, 966, 1920, 17318, 1510, 14180, 26005, 554, 16408, 42028, 112091, 13886, 13942, 1673, 54946 or 2419 gene; and (iii) aberrant post-translational modification of a 1722, 10280, 59917, 85553, 10653, 9235, 21668, 17794, 2210, 6169, 10102, 21061, 17662, 1468, 12282, 6350, 9035, 1820, 23652, 7301, 8925, 8701, 3533, 9462, 9123, 12788, 17729, 65552, 1261, 21476, 33770, 9380, 2569654, 33556, 53656, 44143, 32612, 10671, 261, 44570, 41922, 2552, 2417, 19319, 43969, 8921, 8993, 955, 32345, 966, 1920, 17318, 1510, 14180, 26005, 554, 16408, 42028, 112091, 13886, 13942, 1673, 54946 or 2419 protein.

[0479] Moreover, the 1722, 10280, 59917, 85553, 10653, 9235, 21668, 17794, 2210, 6169, 10102, 21061, 17662, 1468, 12282, 6350, 9035, 1820, 23652, 7301, 8925, 8701, 3533, 9462, 9123, 12788, 17729, 65552, 1261, 21476, 33770, 9380, 2569654, 33556, 53656, 44143, 32612, 10671, 261, 44570, 41922, 2552, 2417, 19319, 43969, 8921, 8993, 955, 32345, 966, 1920, 17318, 1510, 14180, 26005, 554, 16408, 42028, 112091, 13886, 13942, 1673, 54946 or 2419-fusion proteins used in the methods of the invention can be used as immunogens to produce anti-1722, 10280, 59917, 85553, 10653, 9235, 21668, 17794, 2210, 6169, 10102, 21061, 17662, 1468, 12282, 6350, 9035, 1820, 23652, 7301, 8925, 8701, 3533, 9462, 9123, 12788, 17729, 65552, 1261, 21476, 33770, 9380, 2569654, 33556, 53656, 44143, 32612, 10671, 261, 44570, 41922, 2552, 2417, 19319, 43969, 8921, 8993, 955, 32345, 966, 1920, 17318, 1510, 14180, 26005, 554, 16408, 42028, 112091, 13886, 13942, 1673, 54946 or 2419 antibodies in a subject, to purify 1722, 10280, 59917, 85553, 10653, 9235, 21668, 17794, 2210, 6169, 10102, 21061, 17662, 1468, 12282, 6350, 9035, 1820, 23652, 7301, 8925, 8701, 3533, 9462, 9123, 12788, 17729, 65552, 1261, 21476, 33770, 9380, 2569654, 33556, 53656, 44143, 32612, 10671, 261, 44570, 41922, 2552, 2417, 19319, 43969, 8921, 8993, 955, 32345, 966, 1920, 17318, 1510, 14180, 26005, 554, 16408, 42028, 112091, 13886, 13942, 1673, 54946 or 2419 ligands and in screening assays to identify molecules which inhibit the interaction of 1722, 10280, 59917, 85553, 10653, 9235, 21668, 17794, 2210, 6169, 10102, 21061, 17662, 1468, 12282, 6350, 9035, 1820, 23652, 7301, 8925, 8701, 3533, 9462, 9123, 12788, 17729, 65552, 1261, 21476, 33770, 9380, 2569654, 33556, 53656, 44143, 32612, 10671, 261, 44570, 41922, 2552, 2417, 19319, 43969, 8921, 8993, 955, 32345, 966, 1920, 17318, 1510, 14180, 26005, 554, 16408, 42028, 112091, 13886, 13942, 1673, 54946 or 2419 with a 1722, 10280, 59917, 85553, 10653, 9235, 21668, 17794, 2210, 6169, 10102, 21061, 17662, 1468, 12282, 6350, 9035, 1820, 23652, 7301, 8925, 8701, 3533, 9462, 9123, 12788, 17729, 65552, 1261, 21476, 33770, 9380, 2569654, 33556, 53656, 44143, 32612, 10671, 261, 44570, 41922, 2552, 2417, 19319, 43969, 8921, 8993, 955, 32345, 966, 1920, 17318, 1510, 14180, 26005, 554, 16408, 42028, 112091, 13886, 13942, 1673, 54946 or 2419 substrate.

[0480] Preferably, a 1722, 10280, 59917, 85553, 10653, 9235, 21668, 17794, 2210, 6169, 10102, 21061, 17662, 1468, 12282, 6350, 9035, 1820, 23652, 7301, 8925, 8701, 3533, 9462, 9123, 12788, 17729, 65552, 1261, 21476, 33770, 9380, 2569654, 33556, 53656, 44143, 32612, 10671, 261, 44570, 41922, 2552, 2417, 19319, 43969, 8921, 8993, 955, 32345, 966, 1920, 17318, 1510, 14180, 26005, 554, 16408, 42028, 112091, 13886, 13942, 1673, 54946 or 2419 chimeric or fusion protein used in the methods of the invention is produced by standard recombinant DNA techniques. For example, DNA fragments coding for the different polypeptide sequences are ligated together in-frame in accordance with conventional techniques, for example by employing blunt-ended or stagger-ended termini for ligation, restriction enzyme digestion to provide for appropriate termini, filling-in of cohesive ends as appropriate, alkaline phosphatase treatment to avoid undesirable joining, and enzymatic ligation. In another embodiment, the fusion gene can be synthesized by conventional techniques including automated DNA synthesizers. Alternatively, PCR amplification of gene fragments can be carried out using anchor primers which give rise to complementary overhangs between two consecutive gene fragments which can subsequently be annealed and reamplified to generate a chimeric gene sequence (see, for example, Current Protocols in Molecular Biology, eds. Ausubel et al. John Wiley & Sons: 1992). Moreover, many expression vectors are commercially available that already encode a fusion moiety (e.g., a GST polypeptide). A 1722, 10280, 59917, 85553, 10653, 9235, 21668, 17794, 2210, 6169, 10102, 21061, 17662, 1468, 12282, 6350, 9035, 1820, 23652, 7301, 8925, 8701, 3533, 9462, 9123, 12788, 17729, 65552, 1261, 21476, 33770, 9380, 2569654, 33556, 53656, 44143, 32612, 10671, 261, 44570, 41922, 2552, 2417, 19319, 43969, 8921, 8993, 955, 32345, 966, 1920, 17318, 1510, 14180, 26005, 554, 16408, 42028, 112091, 13886, 13942, 1673, 54946 or 2419-encoding nucleic acid can be cloned into such an expression vector such that the fusion moiety is linked in-frame to the 1722, 10280, 59917, 85553, 10653, 9235, 21668, 17794, 2210, 6169, 10102, 21061, 17662, 1468, 12282, 6350, 9035, 1820, 23652, 7301, 8925, 8701, 3533, 9462, 9123, 12788, 17729, 65552, 1261, 21476, 33770, 9380, 2569654, 33556, 53656, 44143, 32612, 10671, 261, 44570, 41922, 2552, 2417, 19319, 43969, 8921, 8993, 955, 32345, 966, 1920, 17318, 1510, 14180, 26005, 554, 16408, 42028, 112091, 13886, 13942, 1673, 54946 or 2419 protein.

[0481] The present invention also pertains to the use of variants of the 1722, 10280, 59917, 85553, 10653, 9235, 21668, 17794, 2210, 6169, 10102, 21061, 17662, 1468, 12282, 6350, 9035, 1820, 23652, 7301, 8925, 8701, 3533, 9462, 9123, 12788, 17729, 65552, 1261, 21476, 33770, 9380, 2569654, 33556, 53656, 44143, 32612, 10671, 261, 44570, 41922, 2552, 2417, 19319, 43969, 8921, 8993, 955, 32345, 966, 1920, 17318, 1510, 14180, 26005, 554, 16408, 42028, 112091, 13886, 13942, 1673, 54946 or 2419 proteins which function as either 1722, 10280, 59917, 85553, 10653, 9235, 21668, 17794, 2210, 6169, 10102, 21061, 17662, 1468, 12282, 6350, 9035, 1820, 23652, 7301, 8925, 8701, 3533, 9462, 9123, 12788, 17729, 65552, 1261, 21476, 33770, 9380, 2569654, 33556, 53656, 44143, 32612, 10671, 261, 44570, 41922, 2552, 2417, 19319, 43969, 8921, 8993, 955, 32345, 966, 1920, 17318, 1510, 14180, 26005, 554, 16408, 42028, 112091, 13886, 13942, 1673, 54946 or 2419 agonists (mimetics) or as 1722, 10280, 59917, 85553, 10653, 9235, 21668, 17794, 2210, 6169, 10102, 21061, 17662, 1468, 12282, 6350, 9035, 1820, 23652, 7301, 8925, 8701, 3533, 9462, 9123, 12788, 17729, 65552, 1261, 21476, 33770, 9380, 2569654, 33556, 53656, 44143, 32612, 10671, 261, 44570, 41922, 2552, 2417, 19319, 43969, 8921, 8993, 955, 32345, 966, 1920, 17318, 1510, 14180, 26005, 554, 16408, 42028, 112091, 13886, 13942, 1673, 54946 or 2419 antagonists. Variants of the 1722, 10280, 59917, 85553, 10653, 9235, 21668, 17794, 2210, 6169, 10102, 21061, 17662, 1468, 12282, 6350, 9035, 1820, 23652, 7301, 8925, 8701, 3533, 9462, 9123, 12788, 17729, 65552, 1261, 21476, 33770, 9380, 2569654, 33556, 53656, 44143, 32612, 10671, 261, 44570, 41922, 2552, 2417, 19319, 43969, 8921, 8993, 955, 32345, 966, 1920, 17318, 1510, 14180, 26005, 554, 16408, 42028, 112091, 13886, 13942, 1673, 54946 or 2419 proteins can be generated by mutagenesis, e.g., discrete point mutation or truncation of a 1722, 10280, 59917, 85553, 10653, 9235, 21668, 17794, 2210, 6169, 10102, 21061, 17662, 1468, 12282, 6350, 9035, 1820, 23652, 7301, 8925, 8701, 3533, 9462, 9123, 12788, 17729, 65552, 1261, 21476, 33770, 9380, 2569654, 33556, 53656, 44143, 32612, 10671, 261, 44570, 41922, 2552, 2417, 19319, 43969, 8921, 8993, 955, 32345, 966, 1920, 17318, 1510, 14180, 26005, 554, 16408, 42028, 112091, 13886, 13942, 1673, 54946 or 2419 protein. An agonist of the 1722, 10280, 59917, 85553, 10653, 9235, 21668, 17794, 2210, 6169, 10102, 21061, 17662, 1468, 12282, 6350, 9035, 1820, 23652, 7301, 8925, 8701, 3533, 9462, 9123, 12788, 17729, 65552, 1261, 21476, 33770, 9380, 2569654, 33556, 53656, 44143, 32612, 10671, 261, 44570, 41922, 2552, 2417, 19319, 43969, 8921, 8993, 955, 32345, 966, 1920, 17318, 1510, 14180, 26005, 554, 16408, 42028, 112091, 13886, 13942, 1673, 54946 or 2419 proteins can retain substantially the same, or a subset, of the biological activities of the naturally occurring form of a 1722, 10280, 59917, 85553, 10653, 9235, 21668, 17794, 2210, 6169, 10102, 21061, 17662, 1468, 12282, 6350, 9035, 1820, 23652, 7301, 8925, 8701, 3533, 9462, 9123, 12788, 17729, 65552, 1261, 21476, 33770, 9380, 2569654, 33556, 53656, 44143, 32612, 10671, 261, 44570, 41922, 2552, 2417, 19319, 43969, 8921, 8993, 955, 32345, 966, 1920, 17318, 1510, 14180, 26005, 554, 16408, 42028, 112091, 13886, 13942, 1673, 54946 or 2419 protein. An antagonist of a 1722, 10280, 59917, 85553, 10653, 9235, 21668, 17794, 2210, 6169, 10102, 21061, 17662, 1468, 12282, 6350, 9035, 1820, 23652, 7301, 8925, 8701, 3533, 9462, 9123, 12788, 17729, 65552, 1261, 21476, 33770, 9380, 2569654, 33556, 53656, 44143, 32612, 10671, 261, 44570, 41922, 2552, 2417, 19319, 43969, 8921, 8993, 955, 32345, 966, 1920, 17318, 1510, 14180, 26005, 554, 16408, 42028, 112091, 13886, 13942, 1673, 54946 or 2419 protein can inhibit one or more of the activities of the naturally occurring form of the 1722, 10280, 59917, 85553, 10653, 9235, 21668, 17794, 2210, 6169, 10102, 21061, 17662, 1468, 12282, 6350, 9035, 1820, 23652, 7301, 8925, 8701, 3533, 9462, 9123, 12788, 17729, 65552, 1261, 21476, 33770, 9380, 2569654, 33556, 53656, 44143, 32612, 10671, 261, 44570, 41922, 2552, 2417, 19319, 43969, 8921, 8993, 955, 32345, 966, 1920, 17318, 1510, 14180, 26005, 554, 16408, 42028, 112091, 13886, 13942, 1673, 54946 or 2419 protein by, for example, competitively modulating a 1722, 10280, 59917, 85553, 10653, 9235, 21668, 17794, 2210, 6169, 10102, 21061, 17662, 1468, 12282, 6350, 9035, 1820, 23652, 7301, 8925, 8701, 3533, 9462, 9123, 12788, 17729, 65552, 1261, 21476, 33770, 9380, 2569654, 33556, 53656, 44143, 32612, 10671, 261, 44570, 41922, 2552, 2417, 19319, 43969, 8921, 8993, 955, 32345, 966, 1920, 17318, 1510, 14180, 26005, 554, 16408, 42028, 112091, 13886, 13942, 1673, 54946 or 2419-mediated activity of a 1722, 10280, 59917, 85553, 10653, 9235, 21668, 17794, 2210, 6169, 10102, 21061, 17662, 1468, 12282, 6350, 9035, 1820, 23652, 7301, 8925, 8701, 3533, 9462, 9123, 12788, 17729, 65552, 1261, 21476, 33770, 9380, 2569654, 33556, 53656, 44143, 32612, 10671, 261, 44570, 41922, 2552, 2417, 19319, 43969, 8921, 8993, 955, 32345, 966, 1920, 17318, 1510, 14180, 26005, 554, 16408, 42028, 112091, 13886, 13942, 1673, 54946 or 2419 protein. Thus, specific biological effects can be elicited by treatment with a variant of limited function. In one embodiment, treatment of a subject with a variant having a subset of the biological activities of the naturally occurring form of the protein has fewer side effects in a subject relative to treatment with the naturally occurring form of the 1722, 10280, 59917, 85553, 10653, 9235, 21668, 17794, 2210, 6169, 10102, 21061, 17662, 1468, 12282, 6350, 9035, 1820, 23652, 7301, 8925, 8701, 3533, 9462, 9123, 12788, 17729, 65552, 1261, 21476, 33770, 9380, 2569654, 33556, 53656, 44143, 32612, 10671, 261, 44570, 41922, 2552, 2417, 19319, 43969, 8921, 8993, 955, 32345, 966, 1920, 17318, 1510, 14180, 26005, 554, 16408, 42028, 112091, 13886, 13942, 1673, 54946 or 2419 protein.

[0482] In one embodiment, variants of a 1722, 10280, 59917, 85553, 10653, 9235, 21668, 17794, 2210, 6169, 10102, 21061, 17662, 1468, 12282, 6350, 9035, 1820, 23652, 7301, 8925, 8701, 3533, 9462, 9123, 12788, 17729, 65552, 1261, 21476, 33770, 9380, 2569654, 33556, 53656, 44143, 32612, 10671, 261, 44570, 41922, 2552, 2417, 19319, 43969, 8921, 8993, 955, 32345, 966, 1920, 17318, 1510, 14180, 26005, 554, 16408, 42028, 112091, 13886, 13942, 1673, 54946 or 2419 protein which function as either 1722, 10280, 59917, 85553, 10653, 9235, 21668, 17794, 2210, 6169, 10102, 21061, 17662, 1468, 12282, 6350, 9035, 1820, 23652, 7301, 8925, 8701, 3533, 9462, 9123, 12788, 17729, 65552, 1261, 21476, 33770, 9380, 2569654, 33556, 53656, 44143, 32612, 10671, 261, 44570, 41922, 2552, 2417, 19319, 43969, 8921, 8993, 955, 32345, 966, 1920, 17318, 1510, 14180, 26005, 554, 16408, 42028, 112091, 13886, 13942, 1673, 54946 or 2419 agonists (mimetics) or as 1722, 10280, 59917, 85553, 10653, 9235, 21668, 17794, 2210, 6169, 10102, 21061, 17662, 1468, 12282, 6350, 9035, 1820, 23652, 7301, 8925, 8701, 3533, 9462, 9123, 12788, 17729, 65552, 1261, 21476, 33770, 9380, 2569654, 33556, 53656, 44143, 32612, 10671, 261, 44570, 41922, 2552, 2417, 19319, 43969, 8921, 8993, 955, 32345, 966, 1920, 17318, 1510, 14180, 26005, 554, 16408, 42028, 112091, 13886, 13942, 1673, 54946 or 2419 antagonists can be identified by screening combinatorial libraries of mutants, e.g., truncation mutants, of a 1722, 10280, 59917, 85553, 10653, 9235, 21668, 17794, 2210, 6169, 10102, 21061, 17662, 1468, 12282, 6350, 9035, 1820, 23652, 7301, 8925, 8701, 3533, 9462, 9123, 12788, 17729, 65552, 1261, 21476, 33770, 9380, 2569654, 33556, 53656, 44143, 32612, 10671, 261, 44570, 41922, 2552, 2417, 19319, 43969, 8921, 8993, 955, 32345, 966, 1920, 17318, 1510, 14180, 26005, 554, 16408, 42028, 112091, 13886, 13942, 1673, 54946 or 2419 protein for 1722, 10280, 59917, 85553, 10653, 9235, 21668, 17794, 2210, 6169, 10102, 21061, 17662, 1468, 12282, 6350, 9035, 1820, 23652, 7301, 8925, 8701, 3533, 9462, 9123, 12788, 17729, 65552, 1261, 21476, 33770, 9380, 2569654, 33556, 53656, 44143, 32612, 10671, 261, 44570, 41922, 2552, 2417, 19319, 43969, 8921, 8993, 955, 32345, 966, 1920, 17318, 1510, 14180, 26005, 554, 16408, 42028, 112091, 13886, 13942, 1673, 54946 or 2419 protein agonist or antagonist activity. In one embodiment, a variegated library of 1722, 10280, 59917, 85553, 10653, 9235, 21668, 17794, 2210, 6169, 10102, 21061, 17662, 1468, 12282, 6350, 9035, 1820, 23652, 7301, 8925, 8701, 3533, 9462, 9123, 12788, 17729, 65552, 1261, 21476, 33770, 9380, 2569654, 33556, 53656, 44143, 32612, 10671, 261, 44570, 41922, 2552, 2417, 19319, 43969, 8921, 8993, 955, 32345, 966, 1920, 17318, 1510, 14180, 26005, 554, 16408, 42028, 112091, 13886, 13942, 1673, 54946 or 2419 variants is generated by combinatorial mutagenesis at the nucleic acid level and is encoded by a variegated gene library. A variegated library of 1722, 10280, 59917, 85553, 10653, 9235, 21668, 17794, 2210, 6169, 10102, 21061, 17662, 1468, 12282, 6350, 9035, 1820, 23652, 7301, 8925, 8701, 3533, 9462, 9123, 12788, 17729, 65552, 1261, 21476, 33770, 9380, 2569654, 33556, 53656, 44143, 32612, 10671, 261, 44570, 41922, 2552, 2417, 19319, 43969, 8921, 8993, 955, 32345, 966, 1920, 17318, 1510, 14180, 26005, 554, 16408, 42028, 112091, 13886, 13942, 1673, 54946 or 2419 variants can be produced by, for example, enzymatically ligating a mixture of synthetic oligonucleotides into gene sequences such that a degenerate set of potential 1722, 10280, 59917, 85553, 10653, 9235, 21668, 17794, 2210, 6169, 10102, 21061, 17662, 1468, 12282, 6350, 9035, 1820, 23652, 7301, 8925, 8701, 3533, 9462, 9123, 12788, 17729, 65552, 1261, 21476, 33770, 9380, 2569654, 33556, 53656, 44143, 32612, 10671, 261, 44570, 41922, 2552, 2417, 19319, 43969, 8921, 8993, 955, 32345, 966, 1920, 17318, 1510, 14180, 26005, 554, 16408, 42028, 112091, 13886, 13942, 1673, 54946 or 2419 sequences is expressible as individual polypeptides, or alternatively, as a set of larger fusion proteins (e.g., for phage display) containing the set of 1722, 10280, 59917, 85553, 10653, 9235, 21668, 17794, 2210, 6169, 10102, 21061, 17662, 1468, 12282, 6350, 9035, 1820, 23652, 7301, 8925, 8701, 3533, 9462, 9123, 12788, 17729, 65552, 1261, 21476, 33770, 9380, 2569654, 33556, 53656, 44143, 32612, 10671, 261, 44570, 41922, 2552, 2417, 19319, 43969, 8921, 8993, 955, 32345, 966, 1920, 17318, 1510, 14180, 26005, 554, 16408, 42028, 112091, 13886, 13942, 1673, 54946 or 2419 sequences therein. There are a variety of methods which can be used to produce libraries of potential 1722, 10280, 59917, 85553, 10653, 9235, 21668, 17794, 2210, 6169, 10102, 21061, 17662, 1468, 12282, 6350, 9035, 1820, 23652, 7301, 8925, 8701, 3533, 9462, 9123, 12788, 17729, 65552, 1261, 21476, 33770, 9380, 2569654, 33556, 53656, 44143, 32612, 10671, 261, 44570, 41922, 2552, 2417, 19319, 43969, 8921, 8993, 955, 32345, 966, 1920, 17318, 1510, 14180, 26005, 554, 16408, 42028, 112091, 13886, 13942, 1673, 54946 or 2419 variants from a degenerate oligonucleotide sequence. Chemical synthesis of a degenerate gene sequence can be performed in an automatic DNA synthesizer, and the synthetic gene then ligated into an appropriate expression vector. Use of a degenerate set of genes allows for the provision, in one mixture, of all of the sequences encoding the desired set of potential 1722, 10280, 59917, 85553, 10653, 9235, 21668, 17794, 2210, 6169, 10102, 21061, 17662, 1468, 12282, 6350, 9035, 1820, 23652, 7301, 8925, 8701, 3533, 9462, 9123, 12788, 17729, 65552, 1261, 21476, 33770, 9380, 2569654, 33556, 53656, 44143, 32612, 10671, 261, 44570, 41922, 2552, 2417, 19319, 43969, 8921, 8993, 955, 32345, 966, 1920, 17318, 1510, 14180, 26005, 554, 16408, 42028, 112091, 13886, 13942, 1673, 54946 or 2419 sequences. Methods for synthesizing degenerate oligonucleotides are known in the art (see, e.g., Narang, S. A. (1983) Tetrahedron 39:3; Itakura et al. (1984) Annu. Rev. Biochem. 53:323; Itakura et al. (1984) Science 198:1056; Ike et al. (1983) Nucleic Acid Res. 11:477).

[0483] In addition, libraries of fragments of a 1722, 10280, 59917, 85553, 10653, 9235, 21668, 17794, 2210, 6169, 10102, 21061, 17662, 1468, 12282, 6350, 9035, 1820, 23652, 7301, 8925, 8701, 3533, 9462, 9123, 12788, 17729, 65552, 1261, 21476, 33770, 9380, 2569654, 33556, 53656, 44143, 32612, 10671, 261, 44570, 41922, 2552, 2417, 19319, 43969, 8921, 8993, 955, 32345, 966, 1920, 17318, 1510, 14180, 26005, 554, 16408, 42028, 112091, 13886, 13942, 1673, 54946 or 2419 protein coding sequence can be used to generate a variegated population of 1722, 10280, 59917, 85553, 10653, 9235, 21668, 17794, 2210, 6169, 10102, 21061, 17662, 1468, 12282, 6350, 9035, 1820, 23652, 7301, 8925, 8701, 3533, 9462, 9123, 12788, 17729, 65552, 1261, 21476, 33770, 9380, 2569654, 33556, 53656, 44143, 32612, 10671, 261, 44570, 41922, 2552, 2417, 19319, 43969, 8921, 8993, 955, 32345, 966, 1920, 17318, 1510, 14180, 26005, 554, 16408, 42028, 112091, 13886, 13942, 1673, 54946 or 2419 fragments for screening and subsequent selection of variants of a 1722, 10280, 59917, 85553, 10653, 9235, 21668, 17794, 2210, 6169, 10102, 21061, 17662, 1468, 12282, 6350, 9035, 1820, 23652, 7301, 8925, 8701, 3533, 9462, 9123, 12788, 17729, 65552, 1261, 21476, 33770, 9380, 2569654, 33556, 53656, 44143, 32612, 10671, 261, 44570, 41922, 2552, 2417, 19319, 43969, 8921, 8993, 955, 32345, 966, 1920, 17318, 1510, 14180, 26005, 554, 16408, 42028, 112091, 13886, 13942, 1673, 54946 or 2419 protein. In one embodiment, a library of coding sequence fragments can be generated by treating a double stranded PCR fragment of a 1722, 10280, 59917, 85553, 10653, 9235, 21668, 17794, 2210, 6169, 10102, 21061, 17662, 1468, 12282, 6350, 9035, 1820, 23652, 7301, 8925, 8701, 3533, 9462, 9123, 12788, 17729, 65552, 1261, 21476, 33770, 9380, 2569654, 33556, 53656, 44143, 32612, 10671, 261, 44570, 41922, 2552, 2417, 19319, 43969, 8921, 8993, 955, 32345, 966, 1920, 17318, 1510, 14180, 26005, 554, 16408, 42028, 112091, 13886, 13942, 1673, 54946 or 2419 coding sequence with a nuclease under conditions wherein nicking occurs only about once per molecule, denaturing the double stranded DNA, renaturing the DNA to form double stranded DNA which can include sense/antisense pairs from different nicked products, removing single stranded portions from reformed duplexes by treatment with S1 nuclease, and ligating the resulting fragment library into an expression vector. By this method, an expression library can be derived which encodes N-terminal, C-terminal and internal fragments of various sizes of the 1722, 10280, 59917, 85553, 10653, 9235, 21668, 17794, 2210, 6169, 10102, 21061, 17662, 1468, 12282, 6350, 9035, 1820, 23652, 7301, 8925, 8701, 3533, 9462, 9123, 12788, 17729, 65552, 1261, 21476, 33770, 9380, 2569654, 33556, 53656, 44143, 32612, 10671, 261, 44570, 41922, 2552, 2417, 19319, 43969, 8921, 8993, 955, 32345, 966, 1920, 17318, 1510, 14180, 26005, 554, 16408, 42028, 112091, 13886, 13942, 1673, 54946 or 2419 protein.

[0484] Several techniques are known in the art for screening gene products of combinatorial libraries made by point mutations or truncation, and for screening cDNA libraries for gene products having a selected property. Such techniques are adaptable for rapid screening of the gene libraries generated by the combinatorial mutagenesis of 1722, 10280, 59917, 85553, 10653, 9235, 21668, 17794, 2210, 6169, 10102, 21061, 17662, 1468, 12282, 6350, 9035, 1820, 23652, 7301, 8925, 8701, 3533, 9462, 9123, 12788, 17729, 65552, 1261, 21476, 33770, 9380, 2569654, 33556, 53656, 44143, 32612, 10671, 261, 44570, 41922, 2552, 2417, 19319, 43969, 8921, 8993, 955, 32345, 966, 1920, 17318, 1510, 14180, 26005, 554, 16408, 42028, 112091, 13886, 13942, 1673, 54946 or 2419 proteins. The most widely used techniques, which are amenable to high through-put analysis, for screening large gene libraries typically include cloning the gene library into replicable expression vectors, transforming appropriate cells with the resulting library of vectors, and expressing the combinatorial genes under conditions in which detection of a desired activity facilitates isolation of the vector encoding the gene whose product was detected. Recursive ensemble mutagenesis (REM), a new technique which enhances the frequency of functional mutants in the libraries, can be used in combination with the screening assays to identify 1722, 10280, 59917, 85553, 10653, 9235, 21668, 17794, 2210, 6169, 10102, 21061, 17662, 1468, 12282, 6350, 9035, 1820, 23652, 7301, 8925, 8701, 3533, 9462, 9123, 12788, 17729, 65552, 1261, 21476, 33770, 9380, 2569654, 33556, 53656, 44143, 32612, 10671, 261, 44570, 41922, 2552, 2417, 19319, 43969, 8921, 8993, 955, 32345, 966, 1920, 17318, 1510, 14180, 26005, 554, 16408, 42028, 112091, 13886, 13942, 1673, 54946 or 2419 variants (Arkin and Yourvan (1992) Proc. Natl. Acad. Sci. USA 89:7811-7815; Delgrave et al. (1993) Protein Engineering 6(3):327-331).

[0485] The methods of the present invention further include the use of anti-1722, 10280, 59917, 85553, 10653, 9235, 21668, 17794, 2210, 6169, 10102, 21061, 17662, 1468, 12282, 6350, 9035, 1820, 23652, 7301, 8925, 8701, 3533, 9462, 9123, 12788, 17729, 65552, 1261, 21476, 33770, 9380, 2569654, 33556, 53656, 44143, 32612, 10671, 261, 44570, 41922, 2552, 2417, 19319, 43969, 8921, 8993, 955, 32345, 966, 1920, 17318, 1510, 14180, 26005, 554, 16408, 42028, 112091, 13886, 13942, 1673, 54946 or 2419 antibodies. An isolated 1722, 10280, 59917, 85553, 10653, 9235, 21668, 17794, 2210, 6169, 10102, 21061, 17662, 1468, 12282, 6350, 9035, 1820, 23652, 7301, 8925, 8701, 3533, 9462, 9123, 12788, 17729, 65552, 1261, 21476, 33770, 9380, 2569654, 33556, 53656, 44143, 32612, 10671, 261, 44570, 41922, 2552, 2417, 19319, 43969, 8921, 8993, 955, 32345, 966, 1920, 17318, 1510, 14180, 26005, 554, 16408, 42028, 112091, 13886, 13942, 1673, 54946 or 2419 protein, or a portion or fragment thereof, can be used as an immunogen to generate antibodies that bind 1722, 10280, 59917, 85553, 10653, 9235, 21668, 17794, 2210, 6169, 10102, 21061, 17662, 1468, 12282, 6350, 9035, 1820, 23652, 7301, 8925, 8701, 3533, 9462, 9123, 12788, 17729, 65552, 1261, 21476, 33770, 9380, 2569654, 33556, 53656, 44143, 32612, 10671, 261, 44570, 41922, 2552, 2417, 19319, 43969, 8921, 8993, 955, 32345, 966, 1920, 17318, 1510, 14180, 26005, 554, 16408, 42028, 112091, 13886, 13942, 1673, 54946 or 2419 using standard techniques for polyclonal and monoclonal antibody preparation. A full-length 1722, 10280, 59917, 85553, 10653, 9235, 21668, 17794, 2210, 6169, 10102, 21061, 17662, 1468, 12282, 6350, 9035, 1820, 23652, 7301, 8925, 8701, 3533, 9462, 9123, 12788, 17729, 65552, 1261, 21476, 33770, 9380, 2569654, 33556, 53656, 44143, 32612, 10671, 261, 44570, 41922, 2552, 2417, 19319, 43969, 8921, 8993, 955, 32345, 966, 1920, 17318, 1510, 14180, 26005, 554, 16408, 42028, 112091, 13886, 13942, 1673, 54946 or 2419 protein can be used or, alternatively, antigenic peptide fragments of 1722, 10280, 59917, 85553, 10653, 9235, 21668, 17794, 2210, 6169, 10102, 21061, 17662, 1468, 12282, 6350, 9035, 1820, 23652, 7301, 8925, 8701, 3533, 9462, 9123, 12788, 17729, 65552, 1261, 21476, 33770, 9380, 2569654, 33556, 53656, 44143, 32612, 10671, 261, 44570, 41922, 2552, 2417, 19319, 43969, 8921, 8993, 955, 32345, 966, 1920, 17318, 1510, 14180, 26005, 554, 16408, 42028, 112091, 13886, 13942, 1673, 54946 or 2419 can be used as immunogens. The antigenic peptide of 1722, 10280, 59917, 85553, 10653, 9235, 21668, 17794, 2210, 6169, 10102, 21061, 17662, 1468, 12282, 6350, 9035, 1820, 23652, 7301, 8925, 8701, 3533, 9462, 9123, 12788, 17729, 65552, 1261, 21476, 33770, 9380, 2569654, 33556, 53656, 44143, 32612, 10671, 261, 44570, 41922, 2552, 2417, 19319, 43969, 8921, 8993, 955, 32345, 966, 1920, 17318, 1510, 14180, 26005, 554, 16408, 42028, 112091, 13886, 13942, 1673, 54946 or 2419 comprises at least 8 amino acid residues of the amino acid sequence shown in SEQ ID NO:2, 4, 6, 8, 10, 12, 14, 16, 18, 20, 22, 24, 26, 28, 30, 32, 34, 36, 38, 40, 42, 44, 46, 48, 50, 52, 54, 56, 58, 60, 62, 64, 66, 68, 70, 72, 74, 76, 78, 80, 82, 84, 86, 88, 90, 92, 94, 96, 98, 100, 102, 104, 106, 108, 110, 112, 114, 116, 118, 120, 122, 124, 126 or 128 and encompasses an epitope of 1722, 10280, 59917, 85553, 10653, 9235, 21668, 17794, 2210, 6169, 10102, 21061, 17662, 1468, 12282, 6350, 9035, 1820, 23652, 7301, 8925, 8701, 3533, 9462, 9123, 12788, 17729, 65552, 1261, 21476, 33770, 9380, 2569654, 33556, 53656, 44143, 32612, 10671, 261, 44570, 41922, 2552, 2417, 19319, 43969, 8921, 8993, 955, 32345, 966, 1920, 17318, 1510, 14180, 26005, 554, 16408, 42028, 112091, 13886, 13942, 1673, 54946 or 2419 such that an antibody raised against the peptide forms a specific immune complex with the 1722, 10280, 59917, 85553, 10653, 9235, 21668, 17794, 2210, 6169, 10102, 21061, 17662, 1468, 12282, 6350, 9035, 1820, 23652, 7301, 8925, 8701, 3533, 9462, 9123, 12788, 17729, 65552, 1261, 21476, 33770, 9380, 2569654, 33556, 53656, 44143, 32612, 10671, 261, 44570, 41922, 2552, 2417, 19319, 43969, 8921, 8993, 955, 32345, 966, 1920, 17318, 1510, 14180, 26005, 554, 16408, 42028, 112091, 13886, 13942, 1673, 54946 or 2419 protein. Preferably, the antigenic peptide comprises at least 10 amino acid residues, more preferably at least 15 amino acid residues, even more preferably at least 20 amino acid residues, and most preferably at least 30 amino acid residues.

[0486] Preferred epitopes encompassed by the antigenic peptide are regions of 1722, 10280, 59917, 85553, 10653, 9235, 21668, 17794, 2210, 6169, 10102, 21061, 17662, 1468, 12282, 6350, 9035, 1820, 23652, 7301, 8925, 8701, 3533, 9462, 9123, 12788, 17729, 65552, 1261, 21476, 33770, 9380, 2569654, 33556, 53656, 44143, 32612, 10671, 261, 44570, 41922, 2552, 2417, 19319, 43969, 8921, 8993, 955, 32345, 966, 1920, 17318, 1510, 14180, 26005, 554, 16408, 42028, 112091, 13886, 13942, 1673, 54946 or 2419 that are located on the surface of the protein, e.g., hydrophilic regions, as well as regions with high antigenicity.

[0487] A 1722, 10280, 59917, 85553, 10653, 9235, 21668, 17794, 2210, 6169, 10102, 21061, 17662, 1468, 12282, 6350, 9035, 1820, 23652, 7301, 8925, 8701, 3533, 9462, 9123, 12788, 17729, 65552, 1261, 21476, 33770, 9380, 2569654, 33556, 53656, 44143, 32612, 10671, 261, 44570, 41922, 2552, 2417, 19319, 43969, 8921, 8993, 955, 32345, 966, 1920, 17318, 1510, 14180, 26005, 554, 16408, 42028, 112091, 13886, 13942, 1673, 54946 or 2419 immunogen is typically used to prepare antibodies by immunizing a suitable subject, (e.g., rabbit, goat, mouse, or other mammal) with the immunogen. An appropriate immunogenic preparation can contain, for example, recombinantly expressed 1722, 10280, 59917, 85553, 10653, 9235, 21668, 17794, 2210, 6169, 10102, 21061, 17662, 1468, 12282, 6350, 9035, 1820, 23652, 7301, 8925, 8701, 3533, 9462, 9123, 12788, 17729, 65552, 1261, 21476, 33770, 9380, 2569654, 33556, 53656, 44143, 32612, 10671, 261, 44570, 41922, 2552, 2417, 19319, 43969, 8921, 8993, 955, 32345, 966, 1920, 17318, 1510, 14180, 26005, 554, 16408, 42028, 112091, 13886, 13942, 1673, 54946 or 2419 protein or a chemically synthesized 1722, 10280, 59917, 85553, 10653, 9235, 21668, 17794, 2210, 6169, 10102, 21061, 17662, 1468, 12282, 6350, 9035, 1820, 23652, 7301, 8925, 8701, 3533, 9462, 9123, 12788, 17729, 65552, 1261, 21476, 33770, 9380, 2569654, 33556, 53656, 44143, 32612, 10671, 261, 44570, 41922, 2552, 2417, 19319, 43969, 8921, 8993, 955, 32345, 966, 1920, 17318, 1510, 14180, 26005, 554, 16408, 42028, 112091, 13886, 13942, 1673, 54946 or 2419 polypeptide. The preparation can further include an adjuvant, such as Freund's complete or incomplete adjuvant, or similar immunostimulatory agent. Immunization of a suitable subject with an immunogenic 1722, 10280, 59917, 85553, 10653, 9235, 21668, 17794, 2210, 6169, 10102, 21061, 17662, 1468, 12282, 6350, 9035, 1820, 23652, 7301, 8925, 8701, 3533, 9462, 9123, 12788, 17729, 65552, 1261, 21476, 33770, 9380, 2569654, 33556, 53656, 44143, 32612, 10671, 261, 44570, 41922, 2552, 2417, 19319, 43969, 8921, 8993, 955, 32345, 966, 1920, 17318, 1510, 14180, 26005, 554, 16408, 42028, 112091, 13886, 13942, 1673, 54946 or 2419 preparation induces a polyclonal anti-1722, 10280, 59917, 85553, 10653, 9235, 21668, 17794, 2210, 6169, 10102, 21061, 17662, 1468, 12282, 6350, 9035, 1820, 23652, 7301, 8925, 8701, 3533, 9462, 9123, 12788, 17729, 65552, 1261, 21476, 33770, 9380, 2569654, 33556, 53656, 44143, 32612, 10671, 261, 44570, 41922, 2552, 2417, 19319, 43969, 8921, 8993, 955, 32345, 966, 1920, 17318, 1510, 14180, 26005, 554, 16408, 42028, 112091, 13886, 13942, 1673, 54946 or 2419 antibody response.

[0488] The term “antibody” as used herein refers to immunoglobulin molecules and immunologically active portions of immunoglobulin molecules, i.e., molecules that contain an antigen binding site which specifically binds (immunoreacts with) an antigen, such as a 1722, 10280, 59917, 85553, 10653, 9235, 21668, 17794, 2210, 6169, 10102, 21061, 17662, 1468, 12282, 6350, 9035, 1820, 23652, 7301, 8925, 8701, 3533, 9462, 9123, 12788, 17729, 65552, 1261, 21476, 33770, 9380, 2569654, 33556, 53656, 44143, 32612, 10671, 261, 44570, 41922, 2552, 2417, 19319, 43969, 8921, 8993, 955, 32345, 966, 1920, 17318, 1510, 14180, 26005, 554, 16408, 42028, 112091, 13886, 13942, 1673, 54946 or 2419. Examples of immunologically active portions of immunoglobulin molecules include F(ab) and F(ab)₂ fragments which can be generated by treating the antibody with an enzyme such as pepsin. The invention provides polyclonal and monoclonal antibodies that bind 1722, 10280, 59917, 85553, 10653, 9235, 21668, 17794, 2210, 6169, 10102, 21061, 17662, 1468, 12282, 6350, 9035, 1820, 23652, 7301, 8925, 8701, 3533, 9462, 9123, 12788, 17729, 65552, 1261, 21476, 33770, 9380, 2569654, 33556, 53656, 44143, 32612, 10671, 261, 44570, 41922, 2552, 2417, 19319, 43969, 8921, 8993, 955, 32345, 966, 1920, 17318, 1510, 14180, 26005, 554, 16408, 42028, 112091, 13886, 13942, 1673, 54946 or 2419 molecules. The term “monoclonal antibody” or “monoclonal antibody composition”, as used herein, refers to a population of antibody molecules that contain only one species of an antigen binding site capable of immunoreacting with a particular epitope of 1722, 10280, 59917, 85553, 10653, 9235, 21668, 17794, 2210, 6169, 10102, 21061, 17662, 1468, 12282, 6350, 9035, 1820, 23652, 7301, 8925, 8701, 3533, 9462, 9123, 12788, 17729, 65552, 1261, 21476, 33770, 9380, 2569654, 33556, 53656, 44143, 32612, 10671, 261, 44570, 41922, 2552, 2417, 19319, 43969, 8921, 8993, 955, 32345, 966, 1920, 17318, 1510, 14180, 26005, 554, 16408, 42028, 112091, 13886, 13942, 1673, 54946 or 2419. A monoclonal antibody composition thus typically displays a single binding affinity for a particular 1722, 10280, 59917, 85553, 10653, 9235, 21668, 17794, 2210, 6169, 10102, 21061, 17662, 1468, 12282, 6350, 9035, 1820, 23652, 7301, 8925, 8701, 3533, 9462, 9123, 12788, 17729, 65552, 1261, 21476, 33770, 9380, 2569654, 33556, 53656, 44143, 32612, 10671, 261, 44570, 41922, 2552, 2417, 19319, 43969, 8921, 8993, 955, 32345, 966, 1920, 17318, 1510, 14180, 26005, 554, 16408, 42028, 112091, 13886, 13942, 1673, 54946 or 2419 protein with which it immunoreacts.

[0489] Polyclonal anti-1722, 10280, 59917, 85553, 10653, 9235, 21668, 17794, 2210, 6169, 10102, 21061, 17662, 1468, 12282, 6350, 9035, 1820, 23652, 7301, 8925, 8701, 3533, 9462, 9123, 12788, 17729, 65552, 1261, 21476, 33770, 9380, 2569654, 33556, 53656, 44143, 32612, 10671, 261, 44570, 41922, 2552, 2417, 19319, 43969, 8921, 8993, 955, 32345, 966, 1920, 17318, 1510, 14180, 26005, 554, 16408, 42028, 112091, 13886, 13942, 1673, 54946 or 2419 antibodies can be prepared as described above by immunizing a suitable subject with a 1722, 10280, 59917, 85553, 10653, 9235, 21668, 17794, 2210, 6169, 10102, 21061, 17662, 1468, 12282, 6350, 9035, 1820, 23652, 7301, 8925, 8701, 3533, 9462, 9123, 12788, 17729, 65552, 1261, 21476, 33770, 9380, 2569654, 33556, 53656, 44143, 32612, 10671, 261, 44570, 41922, 2552, 2417, 19319, 43969, 8921, 8993, 955, 32345, 966, 1920, 17318, 1510, 14180, 26005, 554, 16408, 42028, 112091, 13886, 13942, 1673, 54946 or 2419 immunogen. The anti-1722, 10280, 59917, 85553, 10653, 9235, 21668, 17794, 2210, 6169, 10102, 21061, 17662, 1468, 12282, 6350, 9035, 1820, 23652, 7301, 8925, 8701, 3533, 9462, 9123, 12788, 17729, 65552, 1261, 21476, 33770, 9380, 2569654, 33556, 53656, 44143, 32612, 10671, 261, 44570, 41922, 2552, 2417, 19319, 43969, 8921, 8993, 955, 32345, 966, 1920, 17318, 1510, 14180, 26005, 554, 16408, 42028, 112091, 13886, 13942, 1673, 54946 or 2419 antibody titer in the immunized subject can be monitored over time by standard techniques, such as with an enzyme linked immunosorbent assay (ELISA) using immobilized 1722, 10280, 59917, 85553, 10653, 9235, 21668, 17794, 2210, 6169, 10102, 21061, 17662, 1468, 12282, 6350, 9035, 1820, 23652, 7301, 8925, 8701, 3533, 9462, 9123, 12788, 17729, 65552, 1261, 21476, 33770, 9380, 2569654, 33556, 53656, 44143, 32612, 10671, 261, 44570, 41922, 2552, 2417, 19319, 43969, 8921, 8993, 955, 32345, 966, 1920, 17318, 1510, 14180, 26005, 554, 16408, 42028, 112091, 13886, 13942, 1673, 54946 or 2419. If desired, the antibody molecules directed against 1722, 10280, 59917, 85553, 10653, 9235, 21668, 17794, 2210, 6169, 10102, 21061, 17662, 1468, 12282, 6350, 9035, 1820, 23652, 7301, 8925, 8701, 3533, 9462, 9123, 12788, 17729, 65552, 1261, 21476, 33770, 9380, 2569654, 33556, 53656, 44143, 32612, 10671, 261, 44570, 41922, 2552, 2417, 19319, 43969, 8921, 8993, 955, 32345, 966, 1920, 17318, 1510, 14180, 26005, 554, 16408, 42028, 112091, 13886, 13942, 1673, 54946 or 2419 can be isolated from the mammal (e.g., from the blood) and further purified by well known techniques, such as protein A chromatography to obtain the IgG fraction. At an appropriate time after immunization, e.g., when the anti-1722, 10280, 59917, 85553, 10653, 9235, 21668, 17794, 2210, 6169, 10102, 21061, 17662, 1468, 12282, 6350, 9035, 1820, 23652, 7301, 8925, 8701, 3533, 9462, 9123, 12788, 17729, 65552, 1261, 21476, 33770, 9380, 2569654, 33556, 53656, 44143, 32612, 10671, 261, 44570, 41922, 2552, 2417, 19319, 43969, 8921, 8993, 955, 32345, 966, 1920, 17318, 1510, 14180, 26005, 554, 16408, 42028, 112091, 13886, 13942, 1673, 54946 or 2419 antibody titers are highest, antibody-producing cells can be obtained from the subject and used to prepare monoclonal antibodies by standard techniques, such as the hybridoma technique originally described by Kohler and Milstein (1975) Nature 256:495-497) (see also, Brown et al. (1981) J. Immunol. 127:539-46; Brown et al. (1980) J. Biol. Chem. 255:4980-83; Yeh et al. (1976) Proc. Natl. Acad. Sci. USA 76:2927-31; and Yeh et al. (1982) Int. J. Cancer 29:269-75), the more recent human B cell hybridoma technique (Kozbor et al. (1983) Immunol Today 4:72), the EBV-hybridoma technique (Cole et al. (1985) Monoclonal Antibodies and Cancer Therapy, Alan R. Liss, Inc., pp. 77-96) or trioma techniques. The technology for producing monoclonal antibody hybridomas is well known (see generally Kenneth, R. H. in Monoclonal Antibodies: A New Dimension In Biological Analyses, Plenum Publishing Corp., New York, N.Y. (1980); Lerner, E. A. (1981) Yale J. Biol. Med. 54:387-402; Gefter, M. L. et al. (1977) Somatic Cell Genet. 3:231-36). Briefly, an immortal cell line (typically a myeloma) is fused to lymphocytes (typically splenocytes) from a mammal immunized with a 1722, 10280, 59917, 85553, 10653, 9235, 21668, 17794, 2210, 6169, 10102, 21061, 17662, 1468, 12282, 6350, 9035, 1820, 23652, 7301, 8925, 8701, 3533, 9462, 9123, 12788, 17729, 65552, 1261, 21476, 33770, 9380, 2569654, 33556, 53656, 44143, 32612, 10671, 261, 44570, 41922, 2552, 2417, 19319, 43969, 8921, 8993, 955, 32345, 966, 1920, 17318, 1510, 14180, 26005, 554, 16408, 42028, 112091, 13886, 13942, 1673, 54946 or 2419 immunogen as described above, and the culture supernatants of the resulting hybridoma cells are screened to identify a hybridoma producing a monoclonal antibody that binds 1722, 10280, 59917, 85553, 10653, 9235, 21668, 17794, 2210, 6169, 10102, 21061, 17662, 1468, 12282, 6350, 9035, 1820, 23652, 7301, 8925, 8701, 3533, 9462, 9123, 12788, 17729, 65552, 1261, 21476, 33770, 9380, 2569654, 33556, 53656, 44143, 32612, 10671, 261, 44570, 41922, 2552, 2417, 19319, 43969, 8921, 8993, 955, 32345, 966, 1920, 17318, 1510, 14180, 26005, 554, 16408, 42028, 112091, 13886, 13942, 1673, 54946 or 2419.

[0490] Any of the many well known protocols used for fusing lymphocytes and immortalized cell lines can be applied for the purpose of generating an anti-1722, 10280, 59917, 85553, 10653, 9235, 21668, 17794, 2210, 6169, 10102, 21061, 17662, 1468, 12282, 6350, 9035, 1820, 23652, 7301, 8925, 8701, 3533, 9462, 9123, 12788, 17729, 65552, 1261, 21476, 33770, 9380, 2569654, 33556, 53656, 44143, 32612, 10671, 261, 44570, 41922, 2552, 2417, 19319, 43969, 8921, 8993, 955, 32345, 966, 1920, 17318, 1510, 14180, 26005, 554, 16408, 42028, 112091, 13886, 13942, 1673, 54946 or 2419 monoclonal antibody (see, e.g., G. Galfre et al. (1977) Nature 266:55052; Gefter et al. (1977) supra; Lerner (1981) supra; and Kenneth (1980) supra). Moreover, the ordinarily skilled worker will appreciate that there are many variations of such methods which also would be useful. Typically, the immortal cell line (e.g., a myeloma cell line) is derived from the same mammalian species as the lymphocytes. For example, murine hybridomas can be made by fusing lymphocytes from a mouse immunized with an immunogenic preparation of the present invention with an immortalized mouse cell line. Preferred immortal cell lines are mouse myeloma cell lines that are sensitive to culture medium containing hypoxanthine, aminopterin and thymidine (“HAT medium”). Any ofa number of myeloma cell lines can be used as a fusion partner according to standard techniques, e.g., the P3-NS1/1-Ag4-1, P3-x63-Ag8.653 or Sp2/O-Ag14 myeloma lines. These myeloma lines are available from ATCC. Typically, HAT-sensitive mouse myeloma cells are fused to mouse splenocytes using polyethylene glycol (“PEG”). Hybridoma cells resulting from the fusion are then selected using HAT medium, which kills unfused and unproductively fused myeloma cells (unfused splenocytes die after several days because they are not transformed). Hybridoma cells producing a monoclonal antibody of the invention are detected by screening the hybridoma culture supernatants for antibodies that bind 1722, 10280, 59917, 85553, 10653, 9235, 21668, 17794, 2210, 6169, 10102, 21061, 17662, 1468, 12282, 6350, 9035, 1820, 23652, 7301, 8925, 8701, 3533, 9462, 9123, 12788, 17729, 65552, 1261, 21476, 33770, 9380, 2569654, 33556, 53656, 44143, 32612, 10671, 261, 44570, 41922, 2552, 2417, 19319, 43969, 8921, 8993, 955, 32345, 966, 1920, 17318, 1510, 14180, 26005, 554, 16408, 42028, 112091, 13886, 13942, 1673, 54946 or 2419, e.g., using a standard ELISA assay.

[0491] Alternative to preparing monoclonal antibody-secreting hybridomas, a monoclonal anti-1722, 10280, 59917, 85553, 10653, 9235, 21668, 17794, 2210, 6169, 10102, 21061, 17662, 1468, 12282, 6350, 9035, 1820, 23652, 7301, 8925, 8701, 3533, 9462, 9123, 12788, 17729, 65552, 1261, 21476, 33770, 9380, 2569654, 33556, 53656, 44143, 32612, 10671, 261, 44570, 41922, 2552, 2417, 19319, 43969, 8921, 8993, 955, 32345, 966, 1920, 17318, 1510, 14180, 26005, 554, 16408, 42028, 112091, 13886, 13942, 1673, 54946 or 2419 antibody can be identified and isolated by screening a recombinant combinatorial immunoglobulin library (e.g., an antibody phage display library) with 1722, 10280, 59917, 85553, 10653, 9235, 21668, 17794, 2210, 6169, 10102, 21061, 17662, 1468, 12282, 6350, 9035, 1820, 23652, 7301, 8925, 8701, 3533, 9462, 9123, 12788, 17729, 65552, 1261, 21476, 33770, 9380, 2569654, 33556, 53656, 44143, 32612, 10671, 261, 44570, 41922, 2552, 2417, 19319, 43969, 8921, 8993, 955, 32345, 966, 1920, 17318, 1510, 14180, 26005, 554, 16408, 42028, 112091, 13886, 13942, 1673, 54946 or 2419 to thereby isolate immunoglobulin library members that bind 1722, 10280, 59917, 85553, 10653, 9235, 21668, 17794, 2210, 6169, 10102, 21061, 17662, 1468, 12282, 6350, 9035, 1820, 23652, 7301, 8925, 8701, 3533, 9462, 9123, 12788, 17729, 65552, 1261, 21476, 33770, 9380, 2569654, 33556, 53656, 44143, 32612, 10671, 261, 44570, 41922, 2552, 2417, 19319, 43969, 8921, 8993, 955, 32345, 966, 1920, 17318, 1510, 14180, 26005, 554, 16408, 42028, 112091, 13886, 13942, 1673, 54946 or 2419. Kits for generating and screening phage display libraries are commercially available (e.g., the Pharmacia Recombinant Phage Antibody System, Catalog No. 27-9400-01; and the Stratagene SurfZAP™ Phage Display Kit, Catalog No. 240612). Additionally, examples of methods and reagents particularly amenable for use in generating and screening antibody display library can be found in, for example, Ladner et al. U.S. Pat. No. 5,223,409; Kang et al. PCT International Publication No. WO 92/18619; Dower et al. PCT International Publication No. WO 91/17271; Winter et al. PCT International Publication WO 92/20791; Markland et al. PCT International Publication No. WO 92/15679; Breitling et al. PCT International Publication WO 93/01288; McCafferty et al. PCT International Publication No. WO 92/01047; Garrard et al. PCT International Publication No. WO 92/09690; Ladner et al. PCT International Publication No. WO 90/02809; Fuchs et al. (1991) Bio/Technology 9:1370-1372; Hay et al. (1992) Hum. Antibod. Hybridomas 3:81-85; Huse et al. (1989) Science 246:1275-1281; Griffiths et al. (1993) EMBO J. 12:725-734; Hawkins et al. (1992) J. Mol. Biol. 226:889-896; Clarkson et al. (1991) Nature 352:624-628; Gram et al. (1992) Proc. Natl. Acad. Sci. USA 89:3576-3580; Garrad et al. (1991) Bio/Technology 9:1373-1377; Hoogenboom et al. (1991) Nuc. Acid Res. 19:4133-4137; Barbas et al. (1991) Proc. Natl. Acad. Sci. USA 88:7978-7982; and McCafferty et al. (1990) Nature 348:552-554.

[0492] Additionally, recombinant anti-1722, 10280, 59917, 85553, 10653, 9235, 21668, 17794, 2210, 6169, 10102, 21061, 17662, 1468, 12282, 6350, 9035, 1820, 23652, 7301, 8925, 8701, 3533, 9462, 9123, 12788, 17729, 65552, 1261, 21476, 33770, 9380, 2569654, 33556, 53656, 44143, 32612, 10671, 261, 44570, 41922, 2552, 2417, 19319, 43969, 8921, 8993, 955, 32345, 966, 1920, 17318, 1510, 14180, 26005, 554, 16408, 42028, 112091, 13886, 13942, 1673, 54946 or 2419 antibodies, such as chimeric and humanized monoclonal antibodies, comprising both human and non-human portions, which can be made using standard recombinant DNA techniques, are within the scope of the methods of the invention. Such chimeric and humanized monoclonal antibodies can be produced by recombinant DNA techniques known in the art, for example using methods described in Robinson et al. International Application No. PCT/US86/02269; Akira, et al. European Patent Application 184, 187; Taniguchi, M., European Patent Application 171, 496; Morrison et al. European Patent Application 173, 494; Neuberger et al. PCT International Publication No. WO 86/01533; Cabilly et al. U.S. Pat. No. 4,816,567; Cabilly et al. European Patent Application 125, 023; Better et al. (1988) Science 240:1041-1043; Liu et al. (1987) Proc. Natl. Acad. Sci. USA 84:3439-3443; Liu et al. (1987) J. Immunol. 139:3521-3526; Sun et al. (1987) Proc. Natl. Acad. Sci. USA 84:214-218; Nishimura et al. (1987) Canc. Res. 47:999-1005; Wood et al. (1985) Nature 314:446-449; Shaw et al. (1988) J. Natl. Cancer Inst. 80:1553-1559; Morrison, S. L. (1985) Science 229:1202-1207; Oi et al. (1986) BioTechniques 4:214; Winter U.S. Pat. No. 5,225,539; Jones et al. (1986) Nature 321:552-525; Verhoeyan et al. (1988) Science 239:1534; and Beidler et al. (1988) J. Immunol. 141:40534060.

[0493] An anti-1722, 10280, 59917, 85553, 10653, 9235, 21668, 17794, 2210, 6169, 10102, 21061, 17662, 1468, 12282, 6350, 9035, 1820, 23652, 7301, 8925, 8701, 3533, 9462, 9123, 12788, 17729, 65552, 1261, 21476, 33770, 9380, 2569654, 33556, 53656, 44143, 32612, 10671, 261, 44570, 41922, 2552, 2417, 19319, 43969, 8921, 8993, 955, 32345, 966, 1920, 17318, 1510, 14180, 26005, 554, 16408, 42028, 112091, 13886, 13942, 1673, 54946 or 2419 antibody can be used to detect 1722, 10280, 59917, 85553, 10653, 9235, 21668, 17794, 2210, 6169, 10102, 21061, 17662, 1468, 12282, 6350, 9035, 1820, 23652, 7301, 8925, 8701, 3533, 9462, 9123, 12788, 17729, 65552, 1261, 21476, 33770, 9380, 2569654, 33556, 53656, 44143, 32612, 10671, 261, 44570, 41922, 2552, 2417, 19319, 43969, 8921, 8993, 955, 32345, 966, 1920, 17318, 1510, 14180, 26005, 554, 16408, 42028, 112091, 13886, 13942, 1673, 54946 or 2419 protein (e.g., in a cellular lysate or cell supernatant) in order to evaluate the abundance and pattern of expression of the 1722, 10280, 59917, 85553, 10653, 9235, 21668, 17794, 2210, 6169, 10102, 21061, 17662, 1468, 12282, 6350, 9035, 1820, 23652, 7301, 8925, 8701, 3533, 9462, 9123, 12788, 17729, 65552, 1261, 21476, 33770, 9380, 2569654, 33556, 53656, 44143, 32612, 10671, 261, 44570, 41922, 2552, 2417, 19319, 43969, 8921, 8993, 955, 32345, 966, 1920, 17318, 1510, 14180, 26005, 554, 16408, 42028, 112091, 13886, 13942, 1673, 54946 or 2419 protein. Anti-1722, 10280, 59917, 85553, 10653, 9235, 21668, 17794, 2210, 6169, 10102, 21061, 17662, 1468, 12282, 6350, 9035, 1820, 23652, 7301, 8925, 8701, 3533, 9462, 9123, 12788, 17729, 65552, 1261, 21476, 33770, 9380, 2569654, 33556, 53656, 44143, 32612, 10671, 261, 44570, 41922, 2552, 2417, 19319, 43969, 8921, 8993, 955, 32345, 966, 1920, 17318, 1510, 14180, 26005, 554, 16408, 42028, 112091, 13886, 13942, 1673, 54946 or 2419 antibodies can be used diagnostically to monitor protein levels in tissue as part of a clinical testing procedure, e.g., to, for example, determine the efficacy of a given treatment regimen. Detection can be facilitated by coupling (i.e., physically linking) the antibody to a detectable substance. Examples of detectable substances include various enzymes, prosthetic groups, fluorescent materials, luminescent materials, bioluminescent materials, and radioactive materials. Examples of suitable enzymes include horseradish peroxidase, alkaline phosphatase, β-galactosidase, or acetylcholinesterase; examples of suitable prosthetic group complexes include streptavidin/biotin and avidin/biotin; examples of suitable fluorescent materials include umbelliferone, fluorescein, fluorescein isothiocyanate, rhodamine, dichlorotriazinylamine fluorescein, dansyl chloride or phycoerythrin; an example of a luminescent material includes luminol; examples of bioluminescent materials include luciferase, luciferin, and aequorin, and examples of suitable radioactive material include ¹²⁵I, ¹³¹I, ³⁵S or ³H.

[0494] This invention is further illustrated by the following examples which should not be construed as limiting. The contents of all references, patents and published patent applications cited throughout this application, as well as the Figure and the Sequence Listing is incorporated herein by reference.

### EXAMPLES

### EXAMPLE 1

### TISSUE DISTRIBUTION OF USING TAQMAN™ ANALYSIS

[0495] This example describes the TaqMan™ procedure. The Taqman™ procedure is a quantitative, reverse transcription PCR-based approach for detecting mRNA. The RT-PCR reaction exploits the 5′ nuclease activity of AmpliTaq Gold™ DNA Polymerase to cleave a TaqMan™ probe during PCR. Briefly, cDNA was generated from the samples of interest, e.g., heart, kidney, liver, skeletal muscle, and various vessels, and used as the starting material for PCR amplification. In addition to the 5′ and 3′ gene-specific primers, a gene-specific oligonucleotide probe (complementary to the region being amplified) was included in the reaction (i.e., the Taqman™ probe). The TaqMan™ probe includes the oligonucleotide with a fluorescent reporter dye covalently linked to the 5′ end of the probe (such as FAM (6-carboxyfluorescein), TET (6-carboxy4,7,2′,7′-tetrachlorofluorescein), JOE (6-carboxy-4,5-dichloro-2,7-dimethoxyfluorescein), or VIC) and a quencher dye (TAMRA (6-carboxy-N,N,N′,N′-tetramethylrhodamine) at the 3′ end of the probe.

[0496] During the PCR reaction, cleavage of the probe separates the reporter dye and the quencher dye, resulting in increased fluorescence of the reporter. Accumulation of PCR products is detected directly by monitoring the increase in fluorescence of the reporter dye. When the probe is intact, the proximity of the reporter dye to the quencher dye results in suppression of the reporter fluorescence. During PCR, if the target of interest is present, the probe specifically anneals between the forward and reverse primer sites. The 5′-3′ nucleolytic activity of the AmpliTaq™ Gold DNA Polymerase cleaves the probe between the reporter and the quencher only if the probe hybridizes to the target. The probe fragments are then displaced from the target, and polymerization of the strand continues. The 3′ end of the probe is blocked to prevent extension of the probe during PCR. This process occurs in every cycle and does not interfere with the exponential accumulation of product. RNA was prepared using the trizol method and treated with DNase to remove contaminating genomic DNA. cDNA was synthesized using standard techniques. Mock cDNA synthesis in the absence of reverse transcriptase resulted in samples with no detectable PCR amplification of the control gene confirms efficient removal of genomic DNA contamination.

### EXAMPLE 2

### TISSUE DISTRIBUTION OF USING 1N SITU ANALYSIS

[0497] For in situ analysis, various tissues, e.g., tissues obtained from normal colon, breast, lung, and ovarian normal tissue, as well as colon, breast, lung, and ovarian tumors, colon metastatic to the liver, and angiogenic tissues were first frozen on dry ice. Ten-micrometer-thick sections of the tissues were post-fixed with 4% formaldehyde in DEPC treated 1× phosphate-buffered saline at room temperature for 10 minutes before being rinsed twice in DEPC 1× phosphate-buffered saline and once in 0.1 M triethanolamine-HCl (pH 8.0). Following incubation in 0.25% acetic anhydride-0.1 M triethanolamine-HCl for 10 minutes, sections were rinsed in DEPC 2×SSC (1×SSC is 0.15M NaCl plus 0.015M sodium citrate). Tissue was then dehydrated through a series of ethanol washes, incubated in 100% chloroform for 5 minutes, and then rinsed in 100% ethanol for 1 minute and 95% ethanol for 1 minute and allowed to air dry.

[0498] Hybridizations were performed with ³⁵S-radiolabeled (5×10⁷ cpm/ml) cRNA probes. Probes were incubated in the presence of a solution containing 600 mM NaCl, 10 mM Tris (pH 7.5), 1 mM EDTA, 0.01% sheared salmon sperm DNA, 0.01% yeast tRNA, 0.05% yeast total RNA type X1, 1× Denhardt's solution, 50% formamide, 10% dextran sulfate, 100 mM dithiothreitol, 0.1% sodium dodecyl sulfate (SDS), and 0.1% sodium thiosulfate for 18 hours at 55° C.

[0499] After hybridization, slides were washed with 2×SSC. Sections were then sequentially incubated at 37° C. in TNE (a solution containing 10 mM Tris-HCl (pH 7.6), 500 mM NaCl, and 1 mM EDTA), for 10 minutes, in TNE with 10 μg of RNase A per ml for 30 minutes, and finally in TNE for 10 minutes. Slides were then rinsed with 2×SSC at room temperature, washed with 2×SSC at 50° C. for 1 hour, washed with 0.2×SSC at 55° C. for 1 hour, and 0.2×SSC at 60° C. for 1 hour. Sections were then dehydrated rapidly through serial ethanol-0.3 M sodium acetate concentrations before being air dried and exposed to Kodak Biomax MR scientific imaging film for 24 hours and subsequently dipped in NB-2 photoemulsion and exposed at 4° C. for 7 days before being developed and counter stained.

[0500] Equivalents:

[0501] Those skilled in the art will recognize, or be able to ascertain using no more than routine experimentation, many equivalents to the specific embodiments of the invention described herein. Such equivalents are intended to be encompassed by the following claims.

1. A method for identifying a compound capable of treating a cardiovascular disorder or a thrombotic disorder, comprising:
a) combining a compound to be tested with a 1722, 10280, 59917, 85553, 10653, 9235, 21668, 17794, 2210, 6169, 10102, 21061, 17662, 1468, 12282, 6350, 9035, 1820, 23652, 7301, 8925, 8701, 3533, 9462, 9123, 12788, 17729, 65552, 1261, 21476, 33770, 9380, 2569654, 33556, 53656, 44143, 32612, 10671, 261, 44570, 41922, 2552, 2417, 19319, 43969, 8921, 8993, 955, 32345, 966, 1920, 17318, 1510, 14180, 26005, 554, 16408, 42028, 112091, 13886, 13942, 1673, 54946 or 2419 polypeptide under conditions suitable for binding of the test compound to the polypeptide; and
b) detecting binding of the test compound to the polypeptide to thereby identify a compound which binds to the polypeptide,
thereby identifying a compound capable of treating a cardiovascular disorder or a thrombotic disorder:.

2. The method of claim 1, wherein the compound is selected from the group consisting of a small molecule, a peptide or an antibody.

3. The method of claim 1, wherein the polypeptide further comprises heterologous sequences.

4. The method of claim 1, wherein the polypeptide is an isolated polypeptide, a membrane-bound form of an isolated polypeptide or a cell comprising the polypeptide.

5. The method of claim 1, wherein the disorder is aberrant vascularization, atherosclerosis, thrombosis, coronary artery disease, hyperlipidemia, dyslipidemia, high blood pressure and heart failure.

6. The method of claim 1, wherein the binding of the test compound to the polypeptide is detected by a method selected from the group consisting of:
a) a competition binding assay;
b) an immunoassay; and
c) a yeast two-hybrid assay.

7. A method for identifying a compound capable of treating a cardiovascular disorder or a thrombotic disorder, comprising:
a) combining a compound to be tested with a host cell expressing a 1722, 10280, 59917, 85553, 10653, 9235, 21668, 17794, 2210, 6169, 10102, 21061, 17662, 1468, 12282, 6350, 9035, 1820, 23652, 7301, 8925, 8701, 3533, 9462, 9123, 12788, 17729, 65552, 1261, 21476, 33770, 9380, 2569654, 33556, 53656, 44143, 32612, 10671, 261, 44570, 41922, 2552, 2417, 19319, 43969, 8921, 8993, 955, 32345, 966, 1920, 17318, 1510, 14180, 26005, 554, 16408, 42028, 112091, 13886, 13942, 1673, 54946 or 2419 polypeptide under conditions suitable for binding of the test compound to the polypeptide; and
b) detecting binding of the test compound to the polypeptide to thereby identify a compound which binds to the polypeptide,
thereby identifying a compound capable of treating a cardiovascular disorder or a thrombotic disorder.

8. The method of claim 7, wherein the compound is selected for the group consisting of a small molecule, a peptide, an antibody or an antisense nucleic acid molecule.

9. The method of claim 7, wherein the polypeptide further comprises heterologous sequences.

10. The method of claim 7, wherein the disorder is aberrant vascularization, atherosclerosis, thrombosis, coronary artery disease, hyperlipidemia, dyslipidemia, high blood pressure and heart failure.

11. The method of claim 7, wherein the binding of the test compound to the polypeptide is detected by a method selected from the group consisting of:
a) a competition binding assay;
b) an immunoassay; and
c) a yeast two-hybrid assay.

12. A method of identifying a subject having a cardiovascular or thrombotic disorder, or at risk for developing a cardiovascular or thrombotic disorder comprising:
a) contacting a sample obtained from the subject comprising polypeptides with a 1722, 10280, 59917, 85553, 10653, 9235, 21668, 17794, 2210, 6169, 10102, 21061, 17662, 1468, 12282, 6350, 9035, 1820, 23652, 7301, 8925, 8701, 3533, 9462, 9123, 12788, 17729, 65552, 1261, 21476, 33770, 9380, 2569654, 33556, 53656, 44143, 32612, 10671, 261, 44570, 41922, 2552, 2417, 19319, 43969, 8921, 8993, 955, 32345, 966, 1920, 17318, 1510, 14180, 26005, 554, 16408, 42028, 112091, 13886, 13942, 1673, 54946 or 2419 binding substance; and
b) detecting the presence of a polypeptide in the sample that binds to the 1722, 10280, 59917, 85553, 10653, 9235, 21668, 17794, 2210, 6169, 10102, 21061, 17662, 1468, 12282, 6350, 9035, 1820, 23652, 7301, 8925, 8701, 3533, 9462, 9123, 12788, 17729, 65552, 1261, 21476, 33770, 9380, 2569654, 33556, 53656, 44143, 32612, 10671, 261, 44570, 41922, 2552, 2417, 19319, 43969, 8921, 8993, 955, 32345, 966, 1920, 17318, 1510, 14180, 26005, 554, 16408, 42028, 112091, 13886, 13942, 1673, 54946 or 2419 binding substance, thereby identifying a subject having a cardiovascular or thrombotic disorder, or at risk for developing a cardiovascular or thrombotic disorder.

13. The method of claim 12, wherein the binding substance is an antibody.

14. The method of claim 12, wherein the binding substance is detectably labeled.

15. A method for treating a subject having a cardiovascular or thrombotic disorder characterized by aberrant 1722, 10280, 59917, 85553, 10653, 9235, 21668, 17794, 2210, 6169, 10102, 21061, 17662, 1468, 12282, 6350, 9035, 1820, 23652, 7301, 8925, 8701, 3533, 9462, 9123, 12788, 17729, 65552, 1261, 21476, 33770, 9380, 2569654, 33556, 53656, 44143, 32612, 10671, 261, 44570, 41922, 2552, 2417, 19319, 43969, 8921, 8993, 955, 32345, 966, 1920, 17318, 1510, 14180, 26005, 554, 16408, 42028, 112091, 13886, 13942, 1673, 54946 or 2419 polypeptide activity or aberrant 1722, 10280, 59917, 85553, 10653, 9235, 21668, 17794, 2210, 6169, 10102, 21061, 17662, 1468, 12282, 6350, 9035, 1820, 23652, 7301, 8925, 8701, 3533, 9462, 9123, 12788, 17729, 65552, 1261, 21476, 33770, 9380, 2569654, 33556, 53656, 44143, 32612, 10671, 261, 44570, 41922, 2552, 2417, 19319, 43969, 8921, 8993, 955, 32345, 966, 1920, 17318, 1510, 14180, 26005, 554, 16408, 42028, 112091, 13886, 13942, 1673, 54946 or 2419 nucleic acid expression comprising administering to the subject a 1722, 10280, 59917, 85553, 10653, 9235, 21668, 17794, 2210, 6169, 10102, 21061, 17662, 1468, 12282, 6350, 9035, 1820, 23652, 7301, 8925, 8701, 3533, 9462, 9123, 12788, 17729, 65552, 1261, 21476, 33770, 9380, 2569654, 33556, 53656, 44143, 32612, 10671, 261, 44570, 41922, 2552, 2417, 19319, 43969, 8921, 8993, 955, 32345, 966, 1920, 17318, 1510, 14180, 26005, 554, 16408, 42028, 112091, 13886, 13942, 1673, 54946 or 2419 modulator, thereby treating the subject having a cardiovascular or thrombotic disorder.

16. The method of claim 15, wherein the disorder is aberrant vascularization, atherosclerosis, thrombosis, coronary artery disease, hyperlipidemia, dyslipidemia, high blood pressure and heart failure.

17. The method of claim 15, wherein the 1722, 10280, 59917, 85553, 10653, 9235, 21668, 17794, 2210, 6169, 10102, 21061, 17662, 1468, 12282, 6350, 9035, 1820, 23652, 7301, 8925, 8701, 3533, 9462, 9123, 12788, 17729, 65552, 1261, 21476, 33770, 9380, 2569654, 33556, 53656, 44143, 32612, 10671, 261, 44570, 41922, 2552, 2417, 19319, 43969, 8921, 8993, 955, 32345, 966, 1920, 17318, 1510, 14180, 26005, 554, 16408, 42028, 112091, 13886, 13942, 1673, 54946 or 2419 modulator is administered in a pharmaceutically acceptable formulation.

18. The method of 15, wherein the 1722, 10280, 59917, 85553, 10653, 9235, 21668, 17794, 2210, 6169, 10102, 21061, 17662, 1468, 12282, 6350, 9035, 1820, 23652, 7301, 8925, 8701, 3533, 9462, 9123, 12788, 17729, 65552, 1261, 21476, 33770, 9380, 2569654, 33556, 53656, 44143, 32612, 10671, 261, 44570, 41922, 2552, 2417, 19319, 43969, 8921, 8993, 955, 32345, 966, 1920, 17318, 1510, 14180, 26005, 554, 16408, 42028, 112091, 13886, 13942, 1673, 54946 or 2419 modulator is capable of modulating 1722, 10280, 59917, 85553, 10653, 9235, 21668, 17794, 2210, 6169, 10102, 21061, 17662, 1468, 12282, 6350, 9035, 1820, 23652, 7301, 8925, 8701, 3533, 9462, 9123, 12788, 17729, 65552, 1261, 21476, 33770, 9380, 2569654, 33556, 53656, 44143, 32612, 10671, 261, 44570, 41922, 2552, 2417, 19319, 43969, 8921, 8993, 955, 32345, 966, 1920, 17318, 1510, 14180, 26005, 554, 16408, 42028, 112091, 13886, 13942, 1673, 54946 or 2419 polypeptide activity.

19. The method of claim 18, wherein the 1722, 10280, 59917, 85553, 10653, 9235, 21668, 17794, 2210, 6169, 10102, 21061, 17662, 1468, 12282, 6350, 9035, 1820, 23652, 7301, 8925, 8701, 3533, 9462, 9123, 12788, 17729, 65552, 1261, 21476, 33770, 9380, 2569654, 33556, 53656, 44143, 32612, 10671, 261, 44570, 41922, 2552, 2417, 19319, 43969, 8921, 8993, 955, 32345, 966, 1920, 17318, 1510, 14180, 26005, 554, 16408, 42028, 112091, 13886, 13942, 1673, 54946 or 2419 modulator is an anti-1722, 10280, 59917, 85553, 10653, 9235, 21668, 17794, 2210, 6169, 10102, 21061, 17662, 1468, 12282, 6350, 9035, 1820, 23652, 7301, 8925, 8701, 3533, 9462, 9123, 12788, 17729, 65552, 1261, 21476, 33770, 9380, 2569654, 33556, 53656, 44143, 32612, 10671, 261, 44570, 41922, 2552, 2417, 19319, 43969, 8921, 8993, 955, 32345, 966, 1920, 17318, 1510, 14180, 26005, 554, 16408, 42028, 112091, 13886, 13942, 1673, 54946 or 2419 antibody.

20. The method of claim 15, wherein the 1722, 10280, 59917, 85553, 10653, 9235, 21668, 17794, 2210, 6169, 10102, 21061, 17662, 1468, 12282, 6350, 9035, 1820, 23652, 7301, 8925, 8701, 3533, 9462, 9123, 12788, 17729, 65552, 1261, 21476, 33770, 9380, 2569654, 33556, 53656, 44143, 32612, 10671, 261, 44570, 41922, 2552, 2417, 19319, 43969, 8921, 8993, 955, 32345, 966, 1920, 17318, 1510, 14180, 26005, 554, 16408, 42028, 112091, 13886, 13942, 1673, 54946 or 2419 modulator is capable of modulating 1722, 10280, 59917, 85553, 10653, 9235, 21668, 17794, 2210, 6169, 10102, 21061, 17662, 1468, 12282, 6350, 9035, 1820, 23652, 7301, 8925, 8701, 3533, 9462, 9123, 12788, 17729, 65552, 1261, 21476, 33770, 9380, 2569654, 33556, 53656, 44143, 32612, 10671, 261, 44570, 41922, 2552, 2417, 19319, 43969, 8921, 8993, 955, 32345, 966, 1920, 17318, 1510, 14180, 26005, 554, 16408, 42028, 112091, 13886, 13942, 1673, 54946 or 2419 nucleic acid expression.

The application's sequence listing, which the Patent Office published only in electronic form, follows.

SEQUENCE LISTING (130 sequences)

SEQ ID NO: 1 - DNA, 3742 bp, Homo Sapiens
  CDS (236)...(2974)
gaattccttctctcctcctcctcgcccttctcctcgccctcctcctcctcctcgccctcccctcccgatcctcatccccttgccctcccccagcccagggacttttccggaaagtttttattttccgtctgggctctcggagaaagaagctcctggctcagcggctgcaaaactttcctgctgccgcgccgccagcccccgccctccgctgcccggccctgcgccccgccgagcgatgagcgcccctccggtcctgcggccgcccagtccgctgctgcccgtggcggcggcagctgccgcagcggccgccgcactggtcccagggtccgggcccgggcccgcgccgttcttggctcctgtcgcggccccggtcgggggcatctcgttccatctgcagatcggcctgagccgtgagccggtgctgctgctgcaggactcgtccggggactacagcctggcgcacgtccgcgagatggcttgctccattgtcgaccagaagttccctgaatgtggtttctacggaatgtatgataagatcctgctttttcgccatgaccctacctctgaaaacatccttcagctggtgaaagcggccagtgatatccaggaaggcgatcttattgaagtggtcttgtcacgttccgccacctttgaagactttcagattcgtccccacgctctctttgttcattcatacagagctccagctttctgtgatcactgtggagaaatgctgtgggggctggtacgtcaaggtcttaaatgtgaagggtgtggtctgaattaccataagagatgtgcatttaaaatacccaacaattgcagcggtgtgaggcggagaaggctctcaaacgtttccctcactggggtcagcaccatccgcacatcatctgctgaactctctacaagtgcccctgatgagccccttctgcaaaaatcaccatcagagtcgtttattggtcgagagaagaggtcaaattctcaatcatacattggacgaccaattcaccttgacaagattttgatgtctaaagttaaagtgccgcacacatttgtcatccactcctacacccggcccacagtgtgccagtactgcaagaagcttctgaaggggcttttcaggcagggcttgcagtgcaaagattgcagattcaactgccataaacgttgtgcaccgaaagtaccaaacaactgccttggcgaagtgaccattaatggagatttgcttagccctggggcagagtctgatgtggtcatggaagaagggagtgatgacaatgatagtgaaaggaacagtgggctcatggatgatatggaagaagcaatggtccaagatgcagagatggcaatggcagagtgccagaacgacagtggcgagatgcaagatccagacccagaccacgaggacgccaacagaaccatcagtccatcaacaagcaacaatatcccactcatgagggtagtgcagtctgtcaaacacacgaagaggaaaagcagcacagtcatgaaagaaggatggatggtccactacaccagcaaggacacgctgcggaaacggcactattggagattggatagcaaatgtattaccctctttcagaatgacacaggaagcaggtactacaaggaaattcctttatctgaaattttgtctctggaaccagtaaaaacttcagctttaattcctaatggggccaatcctcattgtttcgaaatcactacggcaaatgtagtgtattatgtgggagaaaatgtggtcaatccttccagcccatcaccaaataacagtgttctcaccagtggcgttggtgcagatgtggccaggatgtgggagatagccatccagcatgcccttatgcccgtcattcccaagggctcctccgtgggtacaggaaccaacttgcacagagatatctctgtgagtatttcagtatcaaattgccagattcaagaaaatgtggacatcagcacagtatatcagatttttcctgatgaagtactgggttctggacagtttggaattgtttatggaggaaaacatcgtaaaacaggaagagatgtagctattaaaatcattgacaaattacgatttccaacaaaacaagaaagccagcttcgtaatgaggttgcaattctacagaaccttcatcaccctggtgttgtaaatttggagtgtatgtttgagacgcctgaaagagtgtttgttgttatggaaaaactccatggagacatgctggaaatgatcttgtcaagtgaaaagggcaggttgccagagcacataacgaagtttttaattactcagatactcgtggctttgcggcaccttcattttaaaaatatcgttcactgtgacctcaaaccagaaaatgtgttgctagcctcagctgatccttttcctcaggtgaaactttgtgattttggttttgcccggatcattggagagaagtctttccggaggtcagtggtgggtacccccgcttacctggctcctgaggtcctaaggaacaagggctacaatcgctctctagacatgtggtctgttggggtcatcatctatgtaagcctaagcggcacattcccatttaatgaagatgaagacatacacgaccaaattcagaatgcagctttcatgtatccaccaaatccctggaaggaaatatctcatgaagccattgatcttatcaacaatttgctgcaagtaaaaatgagaaagcgctacagtgtggataagaccttgagccacccttggctacaggactatcagacctggttagatttgcgagagctggaatgcaaaatcggggagcgctacatcacccatgaaagtgatgacctgaggtgggagaagtatgcaggcgagcagcggctgcagtaccccacacacctgatcaatccaagtgctagccacagtgacactcctgagactgaagaaacagaaatgaaagccctcggtgagcgtgtcagcatcctctgagttccatctcctataatctgtcaaaacactgtggaactaataaatacatacggtcaggtttaacatttgccttgcagaactgccattattttctgtcagatgagaacaaagctgttaaactgttagcactgttgatgtatctgagttgccaagacaaatcaacagaagcatttgtattttgtgtgaccaactgtgttgtattaacaaaagttccctgaaacacgaaacttgttattgtgaatgattcatgttatatttaatgcattaaacctgtctccactgtgcctttgcaaatcagtgtttttcttactggagcttcattttggtaagagacagaatgtatctgtgaagtagttctgtttggtgtgtcccattggtgttgtcattgtaaacaaactcttgaagagtcgattatttccagtgttctatgaacaactccaaaacccatgtgggaaaaaaatgaatgaggagggtagggaataaaatcctaagacacaaatgcatgaacaagttttaatgtatagttttgaatcctttgcctgcctggtgtgcctcagtatatttaaactcaagacaatgcacctagctgtgcaagacctagtgctcttaagcctaaatgccttagaaatgtaaactgccatatataacagatacatttccctctttcttataatactctgttgtactatggaaaatcagctgctcagcaacctttcacctttgtgtatttttcaataataaaaaatattcttgtcaaaaaaaaaaaaa

SEQ ID NO: 2 - protein, 912 aa, Homo Sapiens
MSAPPVLRPPSPLLPVAAAAAAAAAALVPGSGPGPAPFLAPVAAPVGGISFHLQIGLSREPVLLLQDSSGDYSLAHVREMACSIVDQKFPECGFYGMYDKILLFRHDPTSENILQLVKAASDIQEGDLIEVVLSRSATFEDFQIRPHALFVHSYRAPAFCDHCGEMLWGLVRQGLKCEGCGLNYHKRCAFKIPNNCSGVRRRRLSNVSLTGVSTIRTSSAELSTSAPDEPLLQKSPSESFIGREKRSNSQSYIGRPIHLDKILMSKVKVPHTFVIHSYTRPTVCQYCKKLLKGLFRQGLQCKDCRFNCHKRCAPKVPNNCLGEVTINGDLLSPGAESDVVMEEGSDDNDSERNSGLMDDMEEAMVQDAEMAMAECQNDSGEMQDPDPDHEDANRTISPSTSNNIPLMRVVQSVKHTKRKSSTVMKEGWMVHYTSKDTLRKRHYWRLDSKCITLFQNDTGSRYYKEIPLSEILSLEPVKTSALIPNGANPHCFEITTANVVYYVGENVVNPSSPSPNNSVLTSGVGADVARMWEIAIQHALMPVIPKGSSVGTGTNLHRDISVSISVSNCQIQENVDISTVYQIFPDEVLGSGQFGIVYGGKHRKTGRDVAIKIIDKLRFPTKQESQLRNEVAILQNLHHPGVVNLECMFETPERVFVVMEKLHGDMLEMILSSEKGRLPEHITKFLITQILVALRHLHFKNIVHCDLKPENVLLASADPFPQVKLCDFGFARIIGEKSFRRSVVGTPAYLAPEVLRNKGYNRSLDMWSVGVIIYVSLSGTFPFNEDEDIHDQIQNAAFMYPPNPWKEISHEAIDLINNLLQVKMRKRYSVDKTLSHPWLQDYQTWLDLRELECKIGERYITHESDDLRWEKYAGEQRLQYPTHLINPSASHSDTPETEETEMKALGERVSIL

SEQ ID NO: 3 - DNA, 1599 bp, Homo Sapiens
  CDS (74)...(757)
actcttgggaaaactgctgggcaccgtcgtcgcgctgaaggtggttctgtacctgctccgagtgtgcttagcgatggcctggaaatccggcggcgccagccactcggagctaatccacaatctccgcaaaaatggaatcatcaagacagataaagtatttgaagtgatgctggctacagaccgctcccactatgcaaaatgtaacccatacatggattctccacaatcaataggtttccaagcaacaatcagtgctccacacatgcatgcatatgcgctagaacttctatttgatcagttgcatgaaggagctaaagctcttgatgtaggatctggaagtggaatccttactgcatgttttgcacgtatggttggatgtactggaaaagtcataggaattgatcacattaaagagctagtagatgactcagtaaataatgtcaggaaggacgatccaacacttctgtcttcagggagagtacagcttgttgtgggggatggaagaatgggatatgctgaagaagccccttatgatgccattcatgtgggagctgcagcccctgttgtaccccaggcgctaatagatcagttaaagcccggaggaagattgatattgcctgttggtcctgcaggcggaaaccaaatgttggagcagtatgacaagctacaagatggcagcatcaaaatgaagcctctgatgggggtgatatacgtgcctttaacagataaagaaaagcagtggtccaggtggaagtgattttatcttctgctctttcttcttccacacatgcaagggatgaattgtaaaagcaacatcagcttgaccagtataaaattacagtggattgctcatctcagtcctcaaagctttttgaaaaccaacaccatcacagcttgttttggactttgttacactgttattttcagcatgaaaatgtgtgtttttttagggtttctgattcttcaaagaggcacagagccaaattggtagaggaaggatgcaaagtataaatttgtgtaatattactttaacatgcccatattttacttggaaatattaaaagaaagggttctgtaaaatggaaaacttagtttgtgaattgattttgaggagtggtttttcttttcttggacacttaattctgttctgatattaatttatcagattgcttttgtgcattggataacaccaccattcacaagttaagattcttggtatttggatatctgttagatgctactaagaaaatagagatgagctttctttttaaagcttttgatgtggtgtcatagaatagcatgttgtagatacaatcagctgctttgttaccttaaaactaggcatttgtaaatattaaaccttaagatggcaggtgatgtcctgtaaacactcagctgttcagattggacataactgacttagttcttcccttctctctctctcaaaattataggagacttgtagtttagtgtggttttctgtttctaatttgctgctgataatgtatatgaacttaacatgctgtgtaagctgtgtcctagttcttgaacagtttatgcagtgctgctttgccaaataaagttaaaagtaaaagaggc

SEQ ID NO: 4 - protein, 227 aa, Homo Sapiens
MAWKSGGASHSELIHNLRKNGIIKTDKVFEVMLATDRSHYAKCNPYMDSPQSIGFQATISAPHMHAYALELLFDQLHEGAKALDVGSGSGILTACFARMVGCTGKVIGIDHIKELVDDSVNNVRKDDPTLLSSGRVQLVVGDGRMGYAEEAPYDAIHVGAAAPVVPQALIDQLKPGGRLILPVGPAGGNQMLEQYDKLQDGSIKMKPLMGVIYVPLTDKEKQWSRWK

SEQ ID NO: 5 - DNA, 4301 bp, Homo Sapiens
  CDS (43)...(2016)
gctgcgcgcacgcgaccgcatccgggctccttcggccccgccatgggctgctgcagctccgcttcctccgccgcgcagagctccaaacgagaatggaagccgctggaggaccgtagctgcacagacataccatggctgctgctcttcatcctcttctgcattgggatgggatttatttgtggcttttcaatagcaacaggtgcagcagcaagactagtgtcaggatacgacagctatggaaatatctgtgggcagaaaaatacaaagttggaagcaataccaaacagtggcatggaccacacccagcggaagtatgtattctttttggatccatgcaacctggacttgataaaccggaagattaagtctgtagcactgtgtgtagcagcgtgtccaaggcaagaactgaaaactctgagtgatgttcagaagtttgcagagataaatggttcagccctatgtagctacaacctaaagccttctgaatacactacatctccaaaatcttctgttctctgccccaaactaccagttccagcgagtgcacctattccattcttccatcgctgtgctcctgtgaacatttcctgctatgccaagtttgcagaggccctgatcacctttgtcagtgacaatagtgtcttacacaggctgattagtggagtaatgaccagcaaagaaattatattgggactttgcttgttatcactagttctatccatgattttgatggtgataatcaggtatatatcaagagtacttgtgtggatcttaacgattctggtcatactcggttcacttggaggcacaggtgtactatggtggctgtatgcaaagcaaagaaggtctcccaaagaaactgttactcctgagcagcttcagatagctgaagacaatcttcgggccctcctcatttatgccatttcagctacagtgttcacagtgatcttattcctgataatgttggttatgcgcaaacgtgttgctcttaccatcgccttgttccacgtagctggcaaggtcttcattcacttgccactgctagtcttccaacccttctggactttctttgctcttgtcttgttttgggtgtactggatcatgacacttctttttcttggcactaccggcagtcctgttcagaatgagcaaggctttgtggagttcaaaatttctgggcctctgcagtacatgtggtggtaccatgtggtgggcctgatttggatcagtgaatttattctagcatgtcagcagatgacagtggcaggagctgtggtaacatactattttactagggataaaaggaatttgccatttacacctattttggcatcagtaaatcgccttattcgttaccacctaggtacggtggcaaaaggatctttcattatcacattagtcaaaattccgcgaatgatccttatgtatattcacagtcagctcaaaggaaaggaaaatgcttgtgcacgatgtgtgctgaaatcttgcatttgttgcctttggtgtcttgaaaagtgcctaaattatttaaatcagaatgcatacacagccacagctatcaacagcaccaacttctgcacctcagcaaaggatgcctttgtcattctggtggagaatgctttgcgagtggctaccatcaacacagtaggagattttatgttattccttggcaaggtgctgatagtctgcagcacaggtttagctgggattatgctgctcaactaccagcaggactacacagtatgggtgctgcctctgatcatcgtctgcctctttgctttcctagtcgctcattgcttcctgtctatttatgaaatggtagtggatgtattattcttgtgttttgccattgatacaaaatacaatgatgggagccctggcagagaattctatatggataaagtgctgatggagtttgtggaaaacagtaggaaagcaatgaaagaagctggtaagggaggcgtcgctgattccagagagctaaagccgatggcttcgggagcaagttctgcttgaacctagccgacggttatggaaacccattgacattccaaaacaatatatacacacacacataaatcagccaaaatcagagaaaaggaacagggatttaataccttttttatgcttatttttgtcaaacatgtactcctttcatacgggtggcttttacaaggcaacttccgtcatttaatgttttcaactgtaattgtcttaatggaaatgttaaaattcatatctgattaacatttttaataacttagaggagattttaactttatttaaaaataggtaaaattattgtacctaattatgtctaaagtttattcaggggtaatttccctgatgtctgtataaaatcaagatcttattttactgatgcataagtcctagtgggtcaagactaggcatatgctttcagataaataaggaattactccaatcagttttccccaatcaaagaagccatgtcattttacttttagaaacatacaattgggcccaatatgggaattttcataatagttcatacatttgtcagccaacattaaaaggtaaccaactcctcaggtatttgtagtttaccctaacgcttctttaaaagaaagtaggtaaaaaaagaaaagggtagataatctttcgtatgcaaacttttcccttatattttgtctttctttcctttttgactttagtagcatcctccacacatttgtgtgcctgatttgaaaggaagctggggcacccagcgagtttagcctttaagtttctgtgtattgatttgcagattaagtaatgctgagaggaataaagaagggacagaaacatggaacataaagcattgaaaattccggtgcttgggcttcggcttcagagtaacgtcagtggcttagggttaaacggccattttattcaaatgcttgctatacaatctgaaaacacactggcaggtgctcctctccttggcaattcattgagtatccagagttctacgatgtttaactgaagaattggctaatgttttgatcctccagtgtgactgttgtttttgtttgggggtgggtttggggttttttgcttttttattcctgaagcttaccagatatgaatggctaatactccattgttctgcttgttgtaatggtgaatgctttaagaaaaaaaagtgtaatttgctaagaataattcatgatctgtttatgcgataactcctttttgttacaatttttttaaaaaaagctatttttgttaatgtaaagtaaatatttcagagcaaattttttaaacttattgcactaaatacaggctctgtacaaaaaaaaaaaaaaaaaagcctcagcattttatcattccatggaaggagaatcttttgaaagaaagcattgcctcctaccagaactagacagtgaattagatcggtattatggaaatgcatacaagtaatgtcactagggcttaataagcagccgtttgctaatgtgcttcctttcaaagggttggacctttaaattgctgcaaaaggtaaattgtatttttttttaagtattggtgttctttactctagctaggctaaaatttgctaaatgccttggtttcttttaaaagttcatgtaatatttctgatttttcagaatatttgcaataagagtctggattttaaaaaacacatgcatacacacaattaagagctcatgtcttagcaagatctgggaaaccaacattgcgagagtagctattttgaaagaataattctccagaagttaacatctaatatctagtatcaccaaacagtatcgctgttctcttttattcatttgaaatgaatataattatataactaacaattgtccaaatagatgagagagcaaatcatgtgagaaaattcagaataccatctgtttcatagccgcacagattttggactttcacaaacattgggaactaaatttagaattggcaaaagtctagaagatgggtatcaaaacagaagacattccaggagctagcaattttaagaggtgtccctccaaagtgacctgatggaagtcctgaacttggaaattaggttctactcacttggacatccctgcatcatggactgttgctgctccctgttccatatgctcgcaatctcagctatttggaagctaccaggaatgctttctaattatcatttgcaactagaactgtaatcagaaagaaattttgtatttttgtataacttgattgtgtgccattttatataacaggtcctgttttacaaataaattttgttttactaaaaaaaaaaaaaaaaaaaaaaa

SEQ ID NO: 6 - protein, 657 aa, Homo Sapiens
MGCCSSASSAAQSSKREWKPLEDRSCTDIPWLLLFILFCIGMGFICGFSIATGAAARLVSGYDSYGNICGQKNTKLEAIPNSGMDHTQRKYVFFLDPCNLDLINRKIKSVALCVAACPRQELKTLSDVQKFAEINGSALCSYNLKPSEYTTSPKSSVLCPKLPVPASAPIPFFHRCAPVNISCYAKFAEALITFVSDNSVLHRLISGVMTSKEIILGLCLLSLVLSMILMVIIRYISRVLVWILTILVILGSLGGTGVLWWLYAKQRRSPKETVTPEQLQIAEDNLRALLIYAISATVFTVILFLIMLVMRKRVALTIALFHVAGKVFIHLPLLVFQPFWTFFALVLFWVYWIMTLLFLGTTGSPVQNEQGFVEFKISGPLQYMWWYHVVGLIWISEFILACQQMTVAGAVVTYYFTRDKRNLPFTPILASVNRLIRYHLGTVAKGSFIITLVKIPRMILMYIHSQLKGKENACARCVLKSCICCLWCLEKCLNYLNQNAYTATAINSTNFCTSAKDAFVILVENALRVATINTVGDFMLFLGKVLIVCSTGLAGIMLLNYQQDYTVWVLPLIIVCLFAFLVAHCFLSIYEMVVDVLFLCFAIDTKYNDGSPGREFYMDKVLMEFVENSRKAMKEAGKGGVADSRELKPMASGASSA

SEQ ID NO: 7 - DNA, 3564 bp, Homo Sapiens
  CDS (52)...(840)
tctttctcgctgctcagtcacatctttctcttccttccaccccgagggaccatgtcgaggctcagctggggataccgcgagcacaacggtcctattcactggaaggaatttttccctattgctgatggtgatcagcaatctccaattgagattaaaaccaaagaagtgaaatatgactcttccctccgaccacttagtatcaagtatgacccaagctcagctaaaatcatcagcaacagcggccattccttcaatgttgactttgatgacacagagaacaaatcagttctgcgtggtggtcctctcactggaagctacaggttacggcaggttcaccttcactgggggtccgctgatgaccacggctccgagcacatagtagatggagtgagctatgctgcagagctccatgttgttcactggaattcagacaaataccccagctttgttgaggcagctcatgaaccagatggactggctgtcttgggagtgtttttacagattggtgaacctaattcccaactgcaaaagattactgacactttggattccattaaagaaaagggtaaacaaactcgattcacaaattttgacctattgtctctgcttccaccatcctgggactactggacatatcctggttctcttacagttccacctcttcttgagagtgtcacatggattgttttaaagcaacctataaacatcagctctcaacagctggccaaatttcgcagtctcctgtgcacagcggagggtgaagcagcagcttttctggtgagcaatcaccgcccaccacagcctctaaagggccgcaaagtgagagcctctttccattaaaaattgtcaccaatgaactcccccaaacatggctgtggagagacaacaaaacaaaacaaagcacaaaagtctctgccaacaactcttttgtggaattctaatttataggaaacattttagtatgagcttcagtgtcacaaagaaaaccagatctctctctcttttttttttattttttttagtgatagagtctcactctgtcacccaggctggagggcagtggtacagtcttggctaattgcagcctccaactcctggactcaagtgatcctcccacctcagcctccagagtaagtaggaccacaggcatgcacaagcatgcctggctaatttttaaattttttttttttaagaaatagggtcttgctatgttgcccaggctggtctcaagctcctgccctaaagtaggcctcctgcctttgcctctcaaagtgctgggatttcaggcatgggtcatcaagcccagctgacccagagctctttactaacttatctgtctcttatttgcactcatggatattcacagtaagcattgtttgacatatattaaaacccatgaaatatgtctacttcaacctgtgtgaaaatatagttaacattgcaaactttagaatgtattaaaaattttaccttgccatagagactgaattagtcacagctctcagtgatgttagatggaaacttatatctcaaatgataggattgtgatgctttttttgtaacaagtgattctgcttaatattttgttattccagttcataaaaagtagattacgttttcctataaggataatttttgcagtgattatattgctaactctcattgcatgatacctttaataaaatgaacaatataagagttaagggcaatgggataaagctacttaatgtgtctcctccactgatcaaaaatattccatatagtcttggtgaggaattccccaggatataaatggctatttacactgtaatgaattataccatatatgatattcactcagtaatgttaataatgaactggctaataattgacaagatgcagtgcctgccagtttatgacattaacttggtttgaaactaacatatgacatagtaccagtgcagtcagagctgcccttaggcatgatgaacatgtggcccgtttttgcctggtgttttggcagcaaagcaggaagcaattttgtgtgggtcattgttctgtcaatttgtggaaaaaattacttcagtctcatataaatatagaatgggtccataaacccttcaactcatttccatggcaaaactcacttttctttttatacatgtccttcagtctcttaattttgtcaggtggagcttgatcttaattttaacctattatcttttatttttgtttgtttttggtgaaggataagagtggtgtttcttttgccctttctggtacaaacagagggacactaagcattaacttaataatcacatttaagacttgaacacatgctacccttttgtcatcttctgacataagtttacctgagtttccttgatttggaagatttgtttcttttatctctcttcctctggatgtagtttttttttgttttttttttgtttttggacggagtcttagtctgtcactgaggctggagtacagtggcacgatcttggctcactgcaacctccatctcccgggttcaaatgattctcctgcctcagcctcttgagtggctgggattacaggcacatgccaccacacccggctaatttttgtatttttagtagagatgggttttgcaatgttggccaggctggtctcaaactcctgacctcaagtgatctgcctgcctcggcctctcaaattgctggaattacagttgtgagccaccacacctggcttgaatgtagattttaataattgaatttattctgccgtgttgatagaataactgaatatcagtaaattgtgtaacagtggtggatactgttgcataagatgagctcctgaagagtgaagctaattctttggtcaatgttcttttcccctcagtgtctagtttaaggcttttagaagattgatctgtagcaattatttaatgaattgaatatttaaaaaattttttatttgctgtctttggtaattatctctctgcttgaaattaaatgcactataagttaatataacaagtaaaatacattgtcttttgaaaatagtttctttttaaaggaatactaattaattgtaacttgtaaaaccaaaagttctaatggtttttaaaaaccagtgttgagtggaaaagtgtttctttagtttggaaagacctgtgaagtatcctagtcagggaaagaacctgttttctggaagaatgtaagttgctatatgtggaggggcatgtaggacaggggttctaattactgtctgtgagagttactactttgtaacttatggtttctgcttcagtattgtgttggttctgtattataaattgcaccttaatagaccaaaaatatctatacagcactgatttccttgaatattgtgtgttaattgatatatcttctagaggcaaaaggtttaaatgtgttaaaatggttatattgcctcctttttaaacaaattaaagagttgtaaatactagtgtagatctcttttgtttaccacagcaaatactgattttatgattgttaagcatttcatattttaatttaaattggattcaaccacaataaagaaaatgagaaaagcttt

SEQ ID NO: 8 - protein, 262 aa, Homo Sapiens
MSRLSWGYREHNGPIHWKEFFPIADGDQQSPIEIKTKEVKYDSSLRPLSIKYDPSSAKIISNSGHSFNVDFDDTENKSVLRGGPLTGSYRLRQVHLHWGSADDHGSEHIVDGVSYAAELHVVHWNSDKYPSFVEAAHEPDGLAVLGVFLQIGEPNSQLQKITDTLDSIKEKGKQTRFTNFDLLSLLPPSWDYWTYPGSLTVPPLLESVTWIVLKQPINISSQQLAKFRSLLCTAEGEAAAFLVSNHRPPQPLKGRKVRASFH

SEQ ID NO: 9 - DNA, 2106 bp, Homo Sapiens
  CDS (71)...(1942)
gcgctgtcagctcgcagcagccactatctctgtgtgtccgcgtgtgcgcccggtccccgcctgccgcaccatggagagctaccacaagcctgaccagcagaagctgcaggccttgaaggacacggccaaccgcctacgtatcagctccatccaggcctcctctgcggcgggctctggccaccccacgtcatgctgcagcgccgcagtgatcatggctgtcctctttttccacaccatgcgctacaagtcccaggacccccggaatccgcacaatgaccgctttgtgctctccaagggccatgcagctcccatcctctacgcggtctgggctgaagctggtttcctggccgaggcggagctgctgaacctgaggaagatcagctccgacttggacgggcacccggtcccgaaacaagctttcaccgacgtggccactggctccctgggccagggcctcggggccgcttgtgggatggcctacaccggcaaatacttcgacaaggccagctaccgagtctattgcttgctgggagatggggagctgtcagagggctctgtatgggaggccatggccttcgccagcatctataagctggacaaccttgtggccattctagacatcaatcgcctgggccagagtgacccggccccgctgcagcaccagatggacatctaccagaagcggtgcgaggccttcggttggcatgccatcatcgtggatggacacagcgtggaggagctgtgcaaggcctttggccaggccaagcaccagccaacagccatcattgccaagaccttcaagggccgagggatcacgggggtagaagataaggagtcttggcatgggaagcccctccccaaaaacatggctgagcagatcatccaggagatctacagccagatccagagcaaaaagaagatcctggcaacccctccacaggaggacgcaccctcagtggacattgccaacatccgcatgcccagcctgcccagctacaaagttggggacaagatagccacccgcaaggcctacgggcaggcactggccaagctgggccatgccagtgaccgcatcatcgccctggatggggacaccaaaaattccaccttctcggagatcttcaaaaaggagcacccggaccgcttcatcgagtgctacattgccgagcagaacatggtgagcatcgcggtgggctgtgccacccgcaacaggacggtgcccttctgcagcacttttgcagccttcttcacgcgggcctttgaccagattcgcatggcggccatctccgagagcaacatcaacctctgcggctcccactgcggcgtttccatcggggaagacggggcctcccagatggccctagaagatctggctatgtttcggtcagtccccacatcaactgtcttttacccaagtgatggcgttgctacagagaaggcagtggaactagccgccaatacaaagggtatctgcttcatccggaccagccgcccagaaaatgccatcatctataacaacaatgaggacttccaggtcggacaagccaaggtggtcctgaagagcaaggatgaccaggtgaccgttatcggggctggggtgaccctgcacgaggccttggccgctgccgaactgctgaagaaagaaaagatcaacatccgcgtgctggaccccttcaccatcaagcccctggacagaaaactcattctcgacagcgctcgtgccaccaagggcaggatcctcaccgtggaggaccattattatgaaggtggcattggtgaggctgtgtccagtgcagtagtgggcgagcctggcatcactgtcacccacctggcagttaaccgggtaccaagaagtgggaagccagctgagctgctgaagatgtttggtatcgacagggatgccattgcacaagctgtgaggggcctcatcaccaaggcctagggcgggtatgaagtgtggggcgggggtctatacattcctgagattctgggaaaggtgctcaaagatgtactgagaggaggggtaaatatatgttttgagaaaaatgaaaaaaaaaaaaaaaaaaaaaaaaaaaaaaaaaaaaaaaaaaaaaaaaaaaaaaaaaa

SEQ ID NO: 10 - protein, 623 aa, Homo Sapiens [sequence omitted]

SEQ ID NO: 11 - DNA, 3082 bp, Homo Sapiens
  CDS (123)...(2168)
agggagtcgtgtcggcgccaccccggcccccgagcccgcagattgcccaccgaagctcgtgtgtgcacccccgatcccgccagccactcgcccctggcctcgcgggccgtgtctccggcatcatgtgtggtatatttgcttacttaaactaccatgttcctcgaacgagacgagaaatcctggagaccctaatcaaaggccttcagagactggagtacagaggatatgattctgctggtgtgggatttgatggaggcaatgataaagattgggaagccaatgcctgcaaaacccagcttattaagaagaaaggaaaagttaaggcactggatgaagaagttcacaagcaacaagatatggatttggatatagaatttgatgtacaccttggaatagctcatacccgttgggcaacacatggagaacccagtcctgtcaatagccacccccagcgctctgataaaaataatgaatttatcgttattcacaatggaatcatcaccaactacaaagacttgaaaaagtttttggaaagcaaaggctatgacttcgaatctgaaacagacacagagacaattgccaagctcgttaagtatatgtatgacaatcgggaaagtcaagataccagctttactaccttggtggagagagttatccaacaattggaaggtgcttttgcacttgtgtttaaaagtgttcattttcccgggcaagcagttggcacaaggcgaggtagccctctgttgattggtgtacggagtgaacataaactttctactgatcacattcctatactctacagaacaggcaaagacaagaaaggaagctgcaatctctctcgtgtggacagcacaacctgccttttcccggtggaagaaaaagcagtggagtattactttgcttctgatgcaagtgctgtcatagaacacaccaatcgcgtcatctttctggaagatgatgatgttgcagcagtagtggatggacgtctttctatccatcgaattaaacgaactgcaggagatcaccccggacgagctgtgcaaacactccagatggaactccagcagatcatgaagggcaacttcagttcatttatgcagaaggaaatatttgagcagccagagtctgtcgtgaacacaatgagaggaagagtcaactttgatgactatactgtgaatttgggtggtttgaaggatcacataaaggagatccagagatgccggcgtttgattcttattgcttgtggaacaagttaccatgctggtgtagcaacacgtcaagttcttgaggagctgactgagttgcctgtgatggtggaactagcaagtgacttcctggacagaaacacaccagtctttcgagatgatgtttgctttttccttagtcaatcaggtgagacagcagatactttgatgggtcttcgttactgtaaggagagaggagctttaactgtggggatcacaaacacagttggcagttccatatcacgggagacagattgtggagttcatattaatgctggtcctgagattggtgtggccagtacaaaggcttataccagccagtttgtatcccttgtgatgtttgcccttatgatgtgtgatgatcggatctccatgcaagaaagacgcaaagagatcatgcttggattgaaacggctgcctgatttgattaaggaagtactgagcatggatgacgaaattcagaaactagcaacagaactttatcatcagaagtcagttctgataatgggacgaggctatcattatgctacttgtcttgaaggggcactgaaaatcaaagaaattacttatatgcactctgaaggcatccttgctggtgaattgaaacatggccctctggctttggtggataaattgatgcctgtgatcatgatcatcatgagagatcacacttatgccaagtgtcagaatgctcttcagcaagtggttgctcggcaggggcggcctgtggtaatttgtgataaggaggatactgagaccattaagaacacaaaaagaacgatcaaggtgccccactcagtggactgcttgcagggcattctcagcgtgatccctttacagttgctggctttccaccttgctgtgctgagaggctatgatgttgatttcccacggaatcttgccaaatctgtgactgtagagtgaggaatatctatacaaaatgtacgaaactgtatgattaagcaacacaagacaccttttgtatttaaaaccttgatttaaaatatcaccccttgaagcctttttttagtaaatccttatttatatatcagttataattattccactcaatatgtgatttttgtgaagttacctcttacattttcccagtaatttgtggaggactttgaataatggaatctatattggaatctgtatcagaaagattctagctattattttctttaaagaatgctgggtgttgcatttctggaccctccacttcaatctgagaagacaatatgtttctaaaaattggtacttgtttcaccatacttcattcagaccagtgaaagagtagtgcatttaattggagtatctaaagccagtggcagtgtatgctcatacttggacagttagggaagggtttgccaagttttaagagaagatgtgatttattttgaaatttgtttctgttttgtttttaaatcaaactgtaaaacttaaaactgaaaaattttattggtaggatttatatctaagtttggttagccttagtttctcagacttgttgtctattatctgtaggtggaagaaatttaggaagcgaaatattacagtagtgcattggtgggtctcaatccttaacatatttgcacaattttatagcacaaactttaaattcaagctgctttggacaactgacaatatgattttaaatttgaagatgggatgtgtacatgttgggtatcctactactttgtgttttcatctcctaaaagtgttttttatttccttgtatctgtagtcttttattttttaaatgactgctgaatgacatattttatcttgttctttaaaatcacaacacagagctgctattaaattaatattgatat

SEQ ID NO: 12 - protein, 681 aa, Homo Sapiens
MCGIFAYLNYHVPRTRREILETLIKGLQRLEYRGYDSAGVGFDGGNDKDWEANACKTQLIKKKGKVKALDEEVHKQQDMDLDIEFDVHLGIAHTRWATHGEPSPVNSHPQRSDKNNEFIVIHNGIITNYKDLKKFLESKGYDFESETDTETIAKLVKYMYDNRESQDTSFTTLVERVIQQLEGAFALVFKSVHFPGQAVGTRRGSPLLIGVRSEHKLSTDHIPILYRTGKDKKGSCNLSRVDSTTCLFPVEEKAVEYYFASDASAVIEHTNRVIFLEDDDVAAVVDGRLSIHRIKRTAGDHPGRAVQTLQMELQQIMKGNFSSFMQKEIFEQPESVVNTMRGRVNFDDYTVNLGGLKDHIKEIQRCRRLILIACGTSYHAGVATRQVLEELTELPVMVELASDFLDRNTPVFRDDVCFFLSQSGETADTLMGLRYCKERGALTVGITNTVGSSISRETDCGVHINAGPEIGVASTKAYTSQFVSLVMFALMMCDDRISMQERRKEIMLGLKRLPDLIKEVLSMDDEIQKLATELYHQKSVLIMGRGYHYATCLEGALKIKEITYMHSEGILAGELKHGPLALVDKLMPVIMIIMRDHTYAKCQNALQQVVARQGRPVVICDKEDTETIKNTKRTIKVPHSVDCLQGILSVIPLQLLAFHLAVLRGYDVDFPRNLAKSVTVE

SEQ ID NO: 13 - DNA, 1453 bp, Homo Sapiens
  CDS (12)...(1037)
agtgcgcgaagatgcgaaaggtggttttgatcaccggggctagcagtggcattggcctggccctctgcaagcggctgctggcggaagatgatgagcttcatctgtgtttggcgtgcaggaacatgagcaaggcagaagctgtctgtgctgctctgctggcctctcaccccactgctgaggtcaccattgtccaggtggatgtcagcaacctgcagtcggtcttccgggcctccaaggaacttaagcaaaggtttcagagattagactgtatatatctaaatgctgggatcatgcctaatccacaactaaatatcaaagcacttttctttggcctcttttcaagaaaagtgattcatatgttctccacagctgaaggcctgctgacccagggtgataagatcactgctgatggacttcaggaggtgtttgagaccaatgtctttggccattttatcctgattcgggaactggagcctctcctctgtcacagtgacaatccatctcagctcatctggacatcatctcgcagtgcaaggaaatctaatttcagcctcgaggacttccagcacagcaaaggcaaggaaccctacagctcttccaaatatgccactgaccttttgagtgtggctttgaacaggaacttcaaccagcagggtctctattccaatgtggcctgtccaggtacagcattgaccaatttgacatatggaattctgcctccgtttatatggacgctgttgatgccggcaatattgctacttcgcttttttgcaaatgcattcactttgacaccatataatggaacagaagctctggtatggcttttccaccaaaagcctgaatctctcaatcctctgatcaaatatctgagtgccaccactggctttggaagaaattatattatgacccagaagatggacctagatgaagacactgctgaaaaattttatcaaaagttactggaactggaaaagcacattagggtcactattcaaaaaacagataatcaggccaggctcagtggctcatgcctataattccagcactttgggaggccaaggcagaaggatcacttgagaccaggagttcaagaccagcctgagaaacatagtgagcccttgtctctacaaaaagaaataaaaataatagctgggtgtggtggcatgcgcatgtagtcccagctactcagaaggatgaggtgggaggatctcttgaggctgggaggcagaggttgcagtgagctgagattgtgccactgcactccagcctgggtgacagcgagaccctgtctcaaaatatgtatatatttaatatatatataaaaccagagctgacaatgacactctggaacattgcataccttctgtacattctggggtacatggatttctactgagttggataatatgcatttgtaataaactatgaactatgaaaaaaaaaaaaaaaaaaa

SEQ ID NO: 14 - protein, 341 aa, Homo Sapiens
MRKVVLITGASSGIGLALCKRLLAEDDELHLCLACRNMSKAEAVCAALLASHPTAEVTIVQVDVSNLQSVFRASKELKQRFQRLDCIYLNAGIMPNPQLNIKALFFGLFSRKVIHMFSTAEGLLTQGDKITADGLQEVFETNVFGHFILIRELEPLLCHSDNPSQLIWTSSRSARKSNFSLEDFQHSKGKEPYSSSKYATDLLSVALNRNFNQQGLYSNVACPGTALTNLTYGILPPFIWTLLMPAILLLRFFANAFTLTPYNGTEALVWLFHQKPESLNPLIKYLSATTGFGRNYIMTQKMDLDEDTAEKFYQKLLELEKHIRVTIQKTDNQARLSGSCL

SEQ ID NO: 15 - DNA, 1599 bp, Homo Sapiens
  CDS (23)...(1243)
gtggtgcgccgcccgggcgaggatgcggctgttccggtggctgctgaagcagccggtgcccaagcagatcgagcgctactcgcgcttttcgccgtcgccgctctccatcaaacaattcctggacttcgggagagataatgcatgtgagaaaacttcatatatgtttctacgaaaggaacttcctgtgcggctggctaacacaatgagagaagttaatcttctgccggataatttacttaaccgcccttcagtgggattggttcagagttggtatatgcagagttttcttgaacttttagaatatgaaaataagagccctgaggatccacaggtcttggataactttctacaagttctgattaaagtcagaaatagacacaatgatgtggttcctacaatggcacaaggagtgattgaatacaaggagaagtttgggtttgatcctttcattagcactaacatccaatattttctggatcggttttataccaaccgcatctctttccgcatgcttattaatcagcacacacttctgtttgggggtgacactaatcctgttcatcctaaacacataggaagtatcgatcccacctgtaacgtggcggatgtggtgaaagatgcatatgaaacagccaagatgctgtgtgaacagtattacctggtagctccagagctggaagttgaagaattcaatgccaaagcgccagacaaacctattcaggtggtttatgtgccctcacatctgtttcatatgctatttgagttgttcaagaactcaatgagagcgacagttgaactctatgaagacagaaaagagggctaccctgctgttaaaaccctcgttactttgggtaaagaagacttatccattaagatcagtgacctaggtggtggtgtcccacttcgaaaaatagatcgtctttttaactacatgtattctactgctcctaggcccagcctggagcctaccagagctgcccctttggctggatttggttatggtttgccaatttcccgtctgtatgctagatattttcaaggagatctgaaactgtattccatggaaggagtgggtactgatgctgtcatttatttgaaggctctttcaagtgagtcatttgagagacttccagtttttaataagtccgcatggcgccattacaagaccacgcctgaagccgatgattggagcaatcccagcagtgaacccagggatgcttcaaaatacaaagcaaaacagtaatataccaccttgatttccattacaaagtatctgatttgtctgaataaaggtgtcccactcactgttccaggaattcttgcagtgtagaggtattcacaacagcaagcagggatttggcctgccatcaattttatttaaaaagcaattaagtttgcagtttgtcctcataaacgttgtaggttgaaactgaaaaataagttaaaatgatcaatcaagataaaaggtgatctatccatccaatggaatattatttggccttaaaaaggaaggacatctgatatgtgctgcaacatgggtgaatcttgaagtcattatgctaagtgaaataaaccagacataaaaggacaaatacatcg

SEQ ID NO: 16 - protein, 406 aa, Homo Sapiens
MRLFRWLLKQPVPKQIERYSRFSPSPLSIKQFLDFGRDNACEKTSYMFLRKELPVRLANTMREVNLLPDNLLNRPSVGLVQSWYMQSFLELLEYENKSPEDPQVLDNFLQVLIKVRNRHNDVVPTMAQGVIEYKEKFGFDPFISTNIQYFLDRFYTNRISFRMLINQHTLLFGGDTNPVHPKHIGSIDPTCNVADVVKDAYETAKMLCEQYYLVAPELEVEEFNAKAPDKPIQVVYVPSHLFHMLFELFKNSMRATVELYEDRKEGYPAVKTLVTLGKEDLSIKISDLGGGVPLRKIDRLFNYMYSTAPRPSLEPTRAAPLAGFGYGLPISRLYARYFQGDLKLYSMEGVGTDAVIYLKALSSESFERLPVFNKSAWRHYKTTPEADDWSNPSSEPRDASKYKAKQ

SEQ ID NO: 17 - DNA, 1767 bp, Homo Sapiens
  CDS (1)...(1767)
atgtcatcatgtgtctctagccagcccagcagcaaccgggccgccccccaggatgagctggggggcaggggcagcagcagcagcgaaagccagaagccctgtgaggccctgcggggcctctcatccttgagcatccacctgggcatggagtccttcattgtggtcaccgagtgtgagccgggctgtgctgtggacctcggcttggcgcgggaccggcccctggaggccgatggccaagaggtcccccttgactcctccgggtcccaggcccggccccacctctccggtcgcaagctgtctctgcaagagcggtcccagggtgggctggcagccggtggcagcctggacatgaacggacgctgcatctgcccgtccctgccctactcacccgtcagctccccgcagtcctcgcctcggctgccccggcggccgacagtggagtctcaccacgtctccatcacgggtatgcaggactgtgtgcagctgaatcagtataccctgaaggatgaaattggaaagggctcctatggtgtcgtcaagttggcctacaatgaaaatgacaatacctactatgcaatgaaggtgctgtccaaaaagaagctgatccggcaggccggctttccacgtcgccctccaccccgaggcacccggccagctcctggaggctgcatccagcccaggggccccattgagcaggtgtaccaggaaattgccatcctcaagaagctggaccaccccaatgtggtgaagctggtggaggtcctggatgaccccaatgaggaccatctgtacatggtgttcgaactggtcaaccaagggcccgtgatggaagtgcccaccctcaaaccactctctgaagaccaggcccgtttctacttccaggatctgatcaaaggcatcgagtacttacactaccagaagatcatccaccgtgacatcaaaccttccaacctcctggtcggagaagatgggcacatcaagatcgctgactttggtgtgagcaatgaattcaagggcagtgacgcgctcctctccaacaccgtgggcacgcccgccttcatggcacccgagtcgctctctgagacccgcaagatcttctctgggaaggccttggatgtttgggccatgggtgtgacactatactgctttgtctttggccagtgcccattcatggacgagcggatcatgtgtttacacagtaagatcaagagtcaggccctggaatttccagaccagcccgacatagctgaggacttgaaggacctgatcacccgtatgctggacaagaaccccgagtcgaggatcgtggtgccggaaatcaagctgcacccctgggtcacgaggcatggggcggagccgttgccgtcggaggatgagaactgcacgctggtcgaagtgactgaagaggaggtcgagaactcagtcaaacacattcccagcttggcaaccgtgatcctggtgaagaccatgatacgtaaacgctcctttgggaacccattcgagggcagccggcgggaggaacgctcactgtcagcgcctggaaacttgctcaccaaaaaaccaaccagggaatgtgagtccctgtctgagctcaaggaagcaaggcagcgaagacaacctccagggcaccgacccgccccccgtgggggaggaggaagtgctcttgtgagaggcagtccctgcgtggaaagttgctgggcccccgcccccggctcccccgcacgcatgcatccactgcggccggaggaggccatggagcccgagtag

SEQ ID NO: 18 - protein, 588 aa, Homo Sapiens [sequence omitted]

SEQ ID NO: 19 - DNA, 1465 bp, Homo Sapiens
  CDS (91)...(972)
ttggaacacctggcgagtcctcggtgtcggtggccggcagtcatctcgcggccgttcagaattataaggctgtctgcagagatttgaaaaatggcaacaaatgaaagtgtcagcatctttagttcagcatccttggctgtggaatatgtagattcacttttacctgagaatcctctgcaagaaccatttaaaaatgcttggaactatatgttgaataattatacaaagttccagattgcaacatggggatcccttatagttcatgaagccctttatttcttattctgtttacctggatttttatttcaatttataccttatatgaaaaaatacaaaattcaaaaggataagccagagacatgggaaaaccaatggaagtgtttcaaagttcttctctttaatcacttctgtatccagctgcctttgatttgtggaacctattattttacagagtatttcaatattccttatgattgggaaagaatgccaagatggtattttcttttggcaagatgctttggttgtgcagtcattgaagatacttggcactattttctgcatagactcttacaccacaaaagaatatacaagtatattcataaagttcatcatgagtttcaggctccatttggaatggaagctgaatatgcacatcctttggagactctaattcttggaactggatttttcattggaatcgtgcttttgtgtgatcatgtaattcttctttgggcatgggtgaccattcgtttattagaaactattgatgtccatagtggttatgatattcctctcaaccctttaaatctgatccctttctatgctggttctcggcatcatgatttccaccacatgaacttcattggaaactatgcttcaacatttacatggtgggatcgaatttttggaacagactctcagtataatgcctataatgaaaagaggaagaagtttgagaaaaagactgaataaatatctcacgtaaaccttcctgaaagataaacgttttcctgaattcagaaactagtagctaacattgcttctggagagcagaaataagcatgtcttctggctactaagtgataaaaagaacattaacaacctttaattaccttcctagtgggaactttttctactttacctacaagttctatatatgtagaaatgaataaatatatatttaagtacagttttcatgaggaagttttaaaagaccatgttcctaagcttccaagaaggttttggatactagaagtattaatctatggcttttctcccagtaaaaccataggcctgaagttcacattgggtctttaaatcttttagatatatactggtcatttcagaaaattcttcatagtggtattggccttatatttaactttttttttattttttttttgagacaaagccaacaactctgtctccttggctggagtgtggtggcacagtctcagctcactgc

SEQ ID NO: 20 - protein, 293 aa, Homo Sapiens
MATNESVSIFSSASLAVEYVDSLLPENPLQEPFKNAWNYMLNNYTKFQIATWGSLIVHEALYFLFCLPGFLFQFIPYMKKYKIQKDKPETWENQWKCFKVLLFNHFCIQLPLICGTYYFTEYFNIPYDWERMPRWYFLLARCFGCAVIEDTWHYFLHRLLHHKRIYKYIHKVHHEFQAPFGMEAEYAHPLETLILGTGFFIGIVLLCDHVILLWAWVTIRLLETIDVHSGYDIPLNPLNLIPFYAGSRHHDFHHMNFIGNYASTFTWWDRIFGTDSQYNAYNEKRKKFEKKTE

SEQ ID NO: 21 - DNA, 897 bp, Homo Sapiens
  CDS (37)...(870)
ctccgactcaagatatttgtcaaatattttcagaagatggctgatccttggcaggaatgcatggattatgcagtaactctagcaagacaagctggagaggtagtttgtgaagctataaaaaatgaaatgaatgttatgctgaaaagttctccagttgatttggtaactgctacggaccaaaaagttgaaaaaatgcttatctcttccataaaggaaaagtatccatctcacagtttcattggtgaagaatctgtggcagctggggaaaaaagtatcttaaccgacaaccccacatggatcattgaccctattgatggaacaactaactttgtacatagatttccttttgtagctgtttcaattggctttgctgtaaataaaaagatagaatttggagttgtgtacagttgtgtggaaggcaagatgtacactgccagaaaaggaaaaggggccttttgtaatggtcaaaaactacaagtttcacaacaagaagatattaccaaatctctcttggtgactgagttgggctcttctagaacaccagagactgtgagaatggttctttctaatatggaaaagcttttttgcattcctgttcatgggatccggagtgttggaacagcagctgttaatatgtgccttgtggcaactggcggagcagatgcatattatgaaatgggaattcactgctgggatgttgcaggagctggcattattgttactgaagctggtggcgtgctaatggatgttacaggtggaccatttgatttgatgtcacgaagagtaattgctgcaaataatagaatattagcagaaaggatagctaaagaaattcaggttatacctttgcaacgagacgacgaagattaattaaggcagctcatagtcatccagttg

SEQ ID NO: 22 - protein, 277 aa, Homo Sapiens
MADPWQECMDYAVTLARQAGEVVCEAIKNEMNVMLKSSPVDLVTATDQKVEKMLISSIKEKYPSHSFIGEESVAAGEKSILTDNPTWIIDPIDGTTNFVHRFPFVAVSIGFAVNKKIEFGVVYSCVEGKMYTARKGKGAFCNGQKLQVSQQEDITKSLLVTELGSSRTPETVRMVLSNMEKLFCIPVHGIRSVGTAAVNMCLVATGGADAYYEMGIHCWDVAGAGIIVTEAGGVLMDVTGGPFDLMSRRVIAANNRILAERIAKEIQVIPLQRDDED

SEQ ID NO: 23 - DNA, 7280 bp, Homo Sapiens
  CDS (214)...(5871)
agtcacccggaggagttggtcgcacaattatgaaagactcggcttctgctgctagcgccggagctgagttagtcctgagaaggtttccctgggcgttccttgtccggcggcctctgctgccgcctccggagacgcttcccgatagatggctacaggccgcggaggaggaggaggtggagttgctgcccttccggagtccgccccgtgaggagaatgtcccagaaatcctggatagaaagcactttgaccaagagggaatgtgtatatattataccaagttccaaggaccctcacagatgccttccaggatgtcaaatttgtcagcaactcgtcaggtgtttttgtggtcgcttggtcaagcaacatgcttgttttactgcaagtcttgccatgaaatactcagatgtgaaattgggtgaccattttaatcaggcaatagaagaatggtctgtggaaaagcatacagaacagagcccaacggatgcttatggagtcataaattttcaagggggttctcattcctacagagctaagtatgtgaggctatcatatgacaccaaacctgaagtcattctgcaacttctgcttaaagaatggcaaatggagttacccaaacttgttatctctgtacatgggggcatgcagaaatttgagcttcacccacgaatcaagcagttgcttggaaaaggtcttattaaagctgcagttacaactggagcctggattttaactggaggagtaaacacaggtgtggcaaaacatgttggagatgccctcaaagaacatgcttccagatcatctcgaaagatttgcactatcggaatagctccatggggagtgattgaaaacagaaatgatcttgttgggagagatgtggttgctccttatcaaaccttattgaaccccctgagcaaattgaatgttttgaataatctgcattcccatttcatattggtggatgatggcactgttggaaagtatggggcggaagtcagactgagaagagaacttgaaaaaactattaatcagcaaagaattcatgctaggattggccagggtgtccctgtggtggcacttatatttgagggtgggccaaatgttatcctcacagttcttgaataccttcaggaaagcccccctgttccagtagttgtgtgtgaaggaacaggcagagctgcagatctgctagcgtatattcataaacaaacagaagaaggagggaatcttcctgatgcagcagggcacgatattatttccactatcaaaaaaacatttaactttggccagaatgaagcacttcatttatttcaaacactgatggagtgcatgaaaagaaaggagcttatcactgttttccatattgggtcagatgaacatcaagatatagatgtagcaatacttactgcactgctaaaaggtactaatgcatctgcatttgaccagcttatccttacattggcatggggtagagttgacattgccaaaaatcatgtatttgtttatggacagcagtggctggttggatccttggaacaagctatgcttgatgctcttgtaatggatagagttgcatttgtaaaacttcttattgaaaatggagtaagcatgcataaattccttaccattccgagactggaagaactttacaacactaaacaaggtccaactaatccaatgctgtttcatcttgttcgagacgtcaaacagggaaatcttcctccaggatataagatcactctgattgatataggacttgttattgaatatctcatgggaggaacctacagatgcacctatactaggaaacgttttcgattaatatataatagtcttggtggaaataatcggaggtctggccgaaatacctccagcagcactcctcagttgcgaaagagtcatgaatcttttggcaatagggcagataaaaaggaaaaaatgaggcataaccatttcattaagacagcacagccctaccgaccaaagattgatacagttatggaagaaggaaagaagaaaagaaccaaagatgaaattgtagacattgatgatccagaaaccaagcgctttccttatccacttaatgaacttttaatttgggcttgccttatgaagaggcaggtcatggcccgttttttatggcaacatggtgaagaatcaatggctaaagcattagttgcctgtaagatctatcgttcaatggcatatgaagcaaagcagagtgacctggtagatgatacttcagaagaactaaaacagtattccaatgattttggtcagttggccgttgaattattagaacagtccttcagacaagatgaaaccatggctatgaaattgctcacttatgaactgaagaactggagtaattcaacctgccttaagttagcagtttcttcaagacttagaccttttgtagctcacacctgtacacaaatgttgttatctgatatgtggatgggaaggctgaatatgaggaaaaattcctggtacaaggtcatactaagcattttagttccacctgccatattgctgttagagtataaaactaaggctgaaatgtcccatatcccacaatctcaagatgctcatcagatgtcaatggatgacagcgaaaacaactttcagaacataacagaagagatccccatggaagtgtttaaagaagtacggattttggatagtaatgaaggaaagaatgagatggagatacaaatgaaatcaaaaaagcttccaattacgcgaaagttttatgccttttatcatgcaccaattgtaaaattctggtttaacacgttggcatatttaggatttctgatgctttatacatttgtggttcttgtacaaatggaacagttaccttcagttcaagaatggattgttattgcttatatttttacttatgccattgagaaagtccgtgagatctttatgtctgaagctgggaaagtaaaccagaagattaaagtatggtttagtgattacttcaacatcagtgatacaattgccataatttctttcttcattggatttggactaagatttggagcaaaatggaactttgcaaatgcatatgataatcatgtttttgtggctggaagattaatttactgtcttaacataatattttggtatgtgcgtttgctagattttctagctgtaaatcaacaggcaggaccttatgtaatgatgattggaaaaatggtggccaatatgttctacattgtagtgattatggctcttgtattacttagttttggtgttcccagaaaggcaatactttatcctcatgaagcaccatcttggactcttgctaaagatatagtttttcacccatactggatgatttttggtgaagtttatgcatacgaaattgatgtgtgtgcaaatgattctgttatccctcaaatctgtggtcctgggacgtggttgactccatttcttcaagcagtctacctctttgtacagtatatcattatggttaatcttcttattgcatttttcaacaatgtgtatttacaagtgaaggcaatttccaatattgtatggaagtaccagcgttatcattttattatggcttatcatgagaaaccagttctgcctcctccacttatcattcttagccatatagtttctctgttttgctgcatatgtaagagaagaaagaaagataagacttccgatggaccaaaacttttcttaacagaagaagatcaaaagaaacttcatgattttgaagagcagtgtgttgaaatgtatttcaatgaaaaagatgacaaatttcattctgggagtgaagagagaattcgtgtcacttttgaaagagtggaacagatgtgcattcagattaaagaagttggagatcgtgtcaactacataaaaagatcattacaatcattagattctcaaattggccatttgcaagatctttcagccctgacggtagatacattaaaaacactcactgcccagaaagcgtcggaagctagcaaagttcataatgaaatcacacgagaactgagcatttccaaacacttggctcaaaaccttattgatgatggtcctgtaagaccttctgtatggaaaaagcatggtgttgtaaatacacttagctcctctcttcctcaaggtgatcttgaaagtaataatccttttcattgtaatattttaatgaaagatgacaaagatccccagtgtaatatatttggtcaagacttacctgcagtaccccagagaaaagaatttaattttccagaggctggttcctcttctggtgccttattcccaagtgctgtttcccctccagaactgcgacagagactacatggggtagaactcttaaaaatatttaataaaaatcaaaaattaggcagttcatctactagcataccacatctgtcatccccaccaaccaaattttttgttagtacaccatctcagccaagttgcaaaagccacttggaaactggaaccaaagatcaagaaactgtttgctctaaagctacagaaggagataatacagaatttggagcatttgtaggacacagagatagcatggatttacagaggtttaaagaaacatcaaacaagataaaaatactatccgagcagcagaatgatgtaagaaatgtgattatggagtatacagagatgcctaaatatgagaataacaatacttctgaaaacactttgaaacgagtgagttctcttgctggatttactgactgtcacagaacttccattcctgttcattcaaaacaagcagaaaaaatcagtagaaggccatctaccgaagacactcatgaagtagattccaaagcagctttaataccggattggttacaagatagaccatcaaacagagaaatgccatctgaagaaggaacattaaatggtctcacttctccatttaagccagctatggatacaaattactattattcagctgtggaaagaaataacttgatgaggttatcacagagcattccatttacacctgtgcctccaagaggggagcctgtcacagtgtatcgtttggaagagagttcacccaacatactaaataacagcatgtcttcttggtcacaactaggcctctgtgccaaaatagagtttttaagcaaagaggagatgggaggaggtttacgaagagctgtcaaagtacagtgtacctggtcagaacatgatatcctcaaatcagggcatctttatattatcaaatcttttcttccagaggtggttaatacatggtcaagtatttataaagaagatacagttctgcatctctgtctgagagaaattcaacaacagagagcagcacaaaagcttacgtttgcctttaatcaaatgaaacccaaatccataccatattctccaaggttccttgaagttttcctgctgtattgccattcagcaggacagtggtttgctgtggaagaatgtatgactggagaatttagaaaatacaacaataataatggagatgagattattccaactaatactctggaagagatcatgctagcctttagccactggacttacgaatatacaagaggggagttactggtacttgatttgcaaggtgttggtgaaaatttgactgacccatctgtgataaaagcagaagaaaagagatcctgtgatatggtttttggcccagcaaatctaggagaagatgcaattaaaaacttcagagcaaaacatcactgtaattcttgctgtagaaagcttaaacttccagatctgaagaggaatgattatacgcctgataaaattatatttcctcaggatgagccttcagatttgaatcttcagcctggaaattccaccaaagaatcagaatcaactaattctgttcgtctgatgttataatattaatattactgaatcattggttttgcctgcacctcacagaaatgttactgtgtcacttttccctcgggaggaaattgtttggtaatatagaaaggtgtatgcaagttgaatttgctgactccagcacagttaaaaggtcaatattcttttgacctgattaatcagtcagaaagtccctataggatagagctggcagctgagaaattttaaaggtaattgataattagtatttgtaactttttaaagggctctttgtatagcagaggatctcatttgactttgttttgatgagggtgatgccctctcttatgtggtacaataccattaaccaaaggtaggtgtccatgcagattttattggcagctgttttattgccattcaactagggaaatgaagaaatcacgcagccttttggttaaatggcagtcaaaattttcctcagtgtatttagtgtgttcagtgatgatatcactggttcccaactagatgcttgttggccacgggaagggaaatgacttgttctaattctaggttcacagaggtatgagaagcctgaactgaagaccattttcaagagggacggtatttatgaatcagggttaggctccatatttaaagatagagccagtttttttttttaaatagaacccaaattgtgtaaaaatgttaattgggttttttaaacattgttttatcaagtcactgttaagtagaagaaagccatggtaaactgatacataacctaaattataaaagcagaaacctaactcactcgtcaagggaagttaccttttgaggaaagttaaagtacttttttccctatctgtatctatagcaacaacccagaacttacaaacttctccaaagattttattgattgttatatcaaatcagaatgtaaacatgaactcttgcatatatttaaaattgtgttggaacatttgaacatgaatgctgtttgtggtacttaagaaattaattcagttggattatcattatgtgatactggcagattgcagtgcaaccttatgccaataaaatgtaatttaacagccccagatattgttgaatattcaacaataacaagaaaagcttttcatctaagttttatgctttaattttttttctttttttttctttttcttttgtttccttggtactaattttaatttttatttggaagggagcagtataaagcttatttgtatttagtagtgtatctcatagatacagacaaggcaagagatgataagctgtttaaatagtgtttaatattgattgggggtggggagaaagaaaaagtgtattacttaaagatactatatacgttttgtatatcattaaatctttaaaagaaatgaaataaatttattgtttacagatgaaaaaaaaaaaaaaaaaaaaaa

SEQ ID NO: 24 - protein, 1885 aa, Homo Sapiens
MSQKSWIESTLTKRECVYIIPSSKDPHRCLPGCQICQQLVRCFCGRLVKQHACFTASLAMKYSDVKLGDHFNQAIEEWSVEKHTEQSPTDAYGVINFQGGSHSYRAKYVRLSYDTKPEVILQLLLKEWQMELPKLVISVHGGMQKFELHPRIKQLLGKGLIKAAVTTGAWILTGGVNTGVAKHVGDALKEHASRSSRKICTIGIAPWGVIENRNDLVGRDVVAPYQTLLNPLSKLNVLNNLHSHFILVDDGTVGKYGAEVRLRRELEKTINQQRIHARIGQGVPVVALIFEGGPNVILTVLEYLQESPPVPVVVCEGTGRAADLLAYIHKQTEEGGNLPDAAGHDIISTIKKTFNFGQNEALHLFQTLMECMKRKELITVFHIGSDEHQDIDVAILTALLKGTNASAFDQLILTLAWGRVDIAKNHVFVYGQQWLVGSLEQAMLDALVMDRVAFVKLLIENGVSMHKFLTIPRLEELYNTKQGPTNPMLFHLVRDVKQGNLPPGYKITLIDIGLVIEYLMGGTYRCTYTRKRFRLIYNSLGGNNRRSGRNTSSSTPQLRKSHESFGNRADKKEKMRHNHFIKTAQPYRPKIDTVMEEGKKKRTKDEIVDIDDPETKRFPYPLNELLIWACLMKRQVMARFLWQHGEESMAKALVACKIYRSMAYEAKQSDLVDDTSEELKQYSNDFGQLAVELLEQSFRQDETMAMKLLTYELKNWSNSTCLKLAVSSRLRPFVAHTCTQMLLSDMWMGRLNMRKNSWYKVILSILVPPAILLLEYKTKAEMSHIPQSQDAHQMSMDDSENNFQNITEEIPMEVFKEVRILDSNEGKNEMEIQMKSKKLPITRKFYAFYHAPIVKFWFNTLAYLGFLMLYTFVVLVQMEQLPSVQEWIVIAYIFTYAIEKVREIFMSEAGKVNQKIKVWFSDYFNISDTIAIISFFIGFGLRFGAKWNFANAYDNHVFVAGRLIYCLNIIFWYVRLLDFLAVNQQAGPYVMMIGKMVANMFYIVVIMALVLLSFGVPRKAILYPHEAPSWTLAKDIVFHPYWMIFGEVYAYEIDVCANDSVIPQICGPGTWLTPFLQAVYLFVQYIIMVNLLIAFFNNVYLQVKAISNIVWKYQRYHFIMAYHEKPVLPPPLIILSHIVSLFCCICKRRKKDKTSDGPKLFLTEEDQKKLHDFEEQCVEMYFNEKDDKFHSGSEERIRVTFERVEQMCIQIKEVGDRVNYIKRSLQSLDSQIGHLQDLSALTVDTLKTLTAQKASEASKVHNEITRELSISKHLAQNLIDDGPVRPSVWKKHGVVNTLSSSLPQGDLESNNPFHCNILMKDDKDPQCNIFGQDLPAVPQRKEFNFPEAGSSSGALFPSAVSPPELRQRLHGVELLKIFNKNQKLGSSSTSIPHLSSPPTKFFVSTPSQPSCKSHLETGTKDQETVCSKATEGDNTEFGAFVGHRDSMDLQRFKETSNKIKILSEQQNDVRNVIMEYTEMPKYENNNTSENTLKRVSSLAGFTDCHRTSIPVHSKQAEKISRRPSTEDTHEVDSKAALIPDWLQDRPSNREMPSEEGTLNGLTSPFKPAMDTNYYYSAVERNNLMRLSQSIPFTPVPPRGEPVTVYRLEESSPNILNNSMSSWSQLGLCAKIEFLSKEEMGGGLRRAVKVQCTWSEHDILKSGHLYIIKSFLPEVVNTWSSIYKEDTVLHLCLREIQQQRAAQKLTFAFNQMKPKSIPYSPRFLEVFLLYCHSAGQWFAVEECMTGEFRKYNNNNGDEIIPTNTLEEIMLAFSHWTYEYTRGELLVLDLQGVGENLTDPSVIKAEEKRSCDMVFGPANLGEDAIKNFRAKHHCNSCCRKLKLPDLKRNDYTPDKIIFPQDEPSDLNLQPGNSTKESESTNSVRLML

SEQ ID NO: 25 - DNA, 1638 bp, Homo Sapiens
  CDS (70)...(1500)
ggacaaccggctggggtccttgcgcgccgcggctcagggaggagcaccgactgcgccgcaccctgagagatggttggtgccatgtggaaggtgattgtttcgctggtcctgttgatgcctggcccctgtgatgggctgtttcactccctatacagaagtgtttccatgccacctaagggagactcaggacagccattatttctcaccccttacattgaagctgggaagatccaaaaaggaagagaattgagtttggtcggccctttcccaggactgaacatgaagagttatgccggcttcctcaccgtgaataagacttacaacagcaacctcttcttctggttcttcccagctcagatacagccagaagatgccccagtagttctctggctacagggtgggccgggaggttcatccatgtttggactctttgtggaacatgggccttatgttgtcacaagtaacatgaccttgcgtgacagagacttcccctggaccacaacgctctccatgctttacattgacaatccagtgggcacaggcttcagttttactgatgatacccacggatatgcagtcaatgaggacgatgtagcacgggatttatacagtgcactaattcagtttttccagatatttcctgaatataaaaataatgacttttatgtcactggggagtcttatgcagggaaatatgtgccagccattgcacacctcatccattccctcaaccctgtgagagaggtgaagatcaacctgaacggaattgctattggagatggatattctgatcccgaatcaattatagggggctatgcagaattcctgtaccaaattggcttgttggatgagaagcaaaaaaagtacttccagaagcagtgccatgaatgcatagaacacatcaggaagcagaactggcttgaggcctttgaaatactggataaactactagatggcgacttaacaagtgatccttcttacttccagaatgttacaggatgtagtaattactataactttttgcggtgcacggaacctgaggatcagctttactatgtgaaatttttgtcactcccagaggtgagacaagccatccacgtggggaatcagacttttaatgatggaactatagttgaaaagtacttgcgagaagatacagtacagtcagttaagccatggttaactgaaatcatgaataattataaggttctgatctacaatggccaactggacatcatcgtggcagctgccctgacagagcactccttgatgggcatggactggaaaggatcccaggaatacaagaaggcagaaaaaaaagtttggaagatccttaaatctgacagtgaagtggctggttacatccggcaagcgggtgactcccatcaggtaattattcgaggtggaggacatattttaccctatgaccagcctctgagagcttttgacatgattaatcgattcatttatggaaaaggatgggatccttatgttggataaactaccttcccgaaagagaacatcagaggttttcattgctgaaaagaaaatcgtaaaaacagaaaatgtcataggaataaaaaaattatcttttcatatctgcaagatttttttcatcaataaaaattatccttgaaa

SEQ ID NO: 26 - protein, 476 aa, Homo Sapiens [sequence omitted]

SEQ ID NO: 27 - DNA, 2015 bp, Homo Sapiens
  CDS (169)...(1686)
cggaggcacggaagatgaggaagatgatcaggaggatgatgaaggtgaagagggagatgaagacgatgacgacgatggctctgaggggacctcaggggctgccgagctgggggggcgctcaagctgcgaggatccgggctgcccgcgagacgaggagcgggcgccaggatggggtcgatgaagtccaagttcctccaggtcggaggcaatacattctcaaaaactgaaaccagcgccagcccacactgtcctgtgtacgtgccggatcccacatccaccatcaagccggggcctaatagccacaacagcaacacaccaggaatcagggaggcaggctctgaggacatcatcgtggttgccctgtatgattacgaggccattcaccacgaagacctcagcttccagaagggggaccagatggtggtcctagaggaatccggggagtggtggaaggctcgatccctggccacccggaaggagggctacatcccaagcaactatgtcgcccgcgttgactctctggagacagaggagtggtttttcaagggcatcagccggaaggacgcagagcgccaactgctggctcccggcaacatgctgggctccttcatgatccgggatagcgagaccactaaaggaagctactctttgtccgtgcgagactacgaccctcggcagggagataccgtgaaacattacaagatccggaccctggacaacgggggcttctacatatccccccgaagcaccttcagcactctgcaggagctggtggaccactacaagaaggggaacgacgggctctgccagaaactgtcggtgccctgcatgtcttccaagccccagaagccttgggagaaagatgcctgggagatccctcgggaatccctcaagctggagaagaaacttggagctgggcagtttggggaagtctggatggccacctacaacaagcacaccaaggtggcagtgaagacgatgaagccagggagcatgtcggtggaggccttcctggcagaggccaacgtgatgaaaactctgcagcatgacaagctggtcaaacttcatgcggtggtcaccaaggagcccatctacatcatcacggagttcatggccaaaggaagcttgctggactttctgaaaagtgatgagggcagcaagcagccattgccaaaactcattgacttctcagcccagattgcagaaggcatggccttcatcgagcagaggaactacatccaccgagacctccgagctgccaacatcttggtctctgcatccctggtgtgtaagattgctgactttggcctggcccgggtcattgaggacaacgagtacacggctcgggaaggggccaagttccccatcaagtggacagctcctgaagccatcaactttggctccttcaccatcaagtcagacgtctggtcctttggtatcctgctgatggagatcgtcacctacggccggatcccttacccagggatgtcaaaccctgaagtgatccgagctctggagcgtggataccggatgcctcgcccagagaactgcccagaggagctctacaacatcatgatgcgctgctggaaaaaccgtccggaggagcggccgaccttcgaatacatccagagtgtgctggatgacttctacacggccacagagagccagtaccaacagcagccatgatagggaggaccagggcagggcagggggtgcccaggtggtggctcgaaggtggctccagcaccatccgccagggcccacacccccttcctactcccagacacccaccctcgcttcagccacagtttcctcatctgtccagtgggtaggttggactggaaaatctctttttgactcttgcaatccacaatctgacattctcaggaagcccccaagttgatatttctatttcctggaatggttggattttagttacagctgtgatttggaagggaaactttcaaaatagtgaaatgaatatttaaataaaagatataaatgcaagtcttacg

SEQ ID NO: 28 - protein, 505 aa, Homo Sapiens
MGSMKSKFLQVGGNTFSKTETSASPHCPVYVPDPTSTIKPGPNSHNSNTPGIREAGSEDIIVVALYDYEAIHHEDLSFQKGDQMVVLEESGEWWKARSLATRKEGYIPSNYVARVDSLETEEWFFKGISRKDAERQLLAPGNMLGSFMIRDSETTKGSYSLSVRDYDPRQGDTVKHYKIRTLDNGGFYISPRSTFSTLQELVDHYKKGNDGLCQKLSVPCMSSKPQKPWEKDAWEIPRESLKLEKKLGAGQFGEVWMATYNKHTKVAVKTMKPGSMSVEAFLAEANVMKTLQHDKLVKLHAVVTKEPIYIITEFMAKGSLLDFLKSDEGSKQPLPKLIDFSAQIAEGMAFIEQRNYIHRDLRAANILVSASLVCKIADFGLARVIEDNEYTAREGAKFPIKWTAPEAINFGSFTIKSDVWSFGILLMEIVTYGRIPYPGMSNPEVIRALERGYRMPRPENCPEELYNIMMRCWKNRPEERPTFEYIQSVLDDFYTATESQYQQQP

SEQ ID NO: 29 - DNA, 3367 bp, Homo Sapiens
  CDS (152)...(3331)
ctcctgcatagagggtaccattctgcgctgctgcaagttacggaatgaaaaattagaacaacagaaacgtggttctcttgacacttcagtgttagggaacatcagcaagacccatcccaggagaccttgaaggaagcctttgaaagggagaatgaaggagtcatctttgcaaaatagctcctgcagcctgggaaaggagactaaaaaggaaaacatgttccttcagtcgtcaatgctgacctgcattttcctgctaatatctggttcctgtgagttatgcgccgaagaaaatttttctagaagctatccttgtgatgagaaaaagcaaaatgactcagttattgcagagtgcagcaatcgtcgactacaggaagttccccaaacggtgggcaaatatgtgacagaactagacctgtctgataatttcatcacacacataacgaatgaatcatttcaagggctgcaaaatctcactaaaataaatctaaaccacaaccccaatgtacagcaccagaacggaaatcccggtatacaatcaaatggcttgaatatcacagacggggcattcctcaacctaaaaaacctaagggagttactgcttgaagacaaccagttaccccaaataccctctggtttgccagagtctttgacagaacttagtctaattcaaaacaatatatacaacataactaaagagggcatttcaagacttataaacttgaaaaatctctatttggcctggaactgctattttaacaaagtttgcgagaaaactaacatagaagatggagtatttgaaacgctgacaaatttggagttgctatcactatctttcaattctctttcacacgtgtcacccaaactgccaagctccctacgcaaactttttctgagcaacacccagatcaaatacattagtgaagaagatttcaagggattgataaatttaacattactagatttaagcgggaactgtccgaggtgcttcaatgccccatttccatgcgtgccttgtgatggtggtgcttcaattaatatagatcgttttgcttttcaaaacttgacccaacttcgatacctaaacctctctagcacttccctcaggaagattaatgctgcctggtttaaaaatatgcctcatctgaaggtgctggatcttgaattcaactatttagtgggagaaatagcctctggggcatttttaacgatgctgccccgcttagaaatacttgacttgtcttttaactatataaaggggagttatccacagcatattaatatttccagaaacttctctaaacctttgtctctacgggcattgcatttaagaggttatgtgttccaggaactcagagaagatgatttccagcccctgatgcagcttccaaacttatcgactatcaacttgggtattaattttattaagcaaatcgatttcaaacttttccaaaatttctccaatctggaaattatttacttgtcagaaaacagaatatcaccgttggtaaaagatacccggcagagttatgcaaatagttcctcttttcaacgtcatatccggaaacgacgctcaacagattttgagtttgacccacattcgaacttttatcatttcacccgtcctttaataaagccacaatgtgctgcttatggaaaagccttagatttaagcctcaacagtattttcttcattgggccaaaccaatttgaaaatcttcctgacattgcctgtttaaatctgtctgcaaatagcaatgctcaagtgttaagtggaactgaattttcagccattcctcatgtcaaatatttggatttgacaaacaatagactagactttgataatgctagtgctcttactgaattgtccgacttggaagttctagatctcagctataattcacactatttcagaatagcaggcgtaacacatcatctagaatttattcaaaatttcacaaatctaaaagttttaaacttgagccacaacaacatttatactttaacagataagtataacctggaaagcaagtccctggtagaattagttttcagtggcaatcgccttgacattttgtggaatgatgatgacaacaggtatatctccattttcaaaggtctcaagaatctgacacgtctggatttatcccttaataggctgaagcacatcccaaatgaagcattccttaatttgccagcgagtctcactgaactacatataaatgataatatgttaaagttttttaactggacattactccagcagtttcctcgtctcgagttgcttgacttacgtggaaacaaactactctttttaactgatagcctatctgactttacatcttcccttcggacactgctgctgagtcataacaggatttcccacctaccctctggctttctttctgaagtcagtagtctgaagcacctcgatttaagttccaatctgctaaaaacaatcaacaaatccgcacttgaaactaagaccaccaccaaattatctatgttggaactacacggaaacccctttgaatgcacctgtgacattggagatttccgaagatggatggatgaacatctgaatgtcaaaattcccagactggtagatgtcatttgtgccagtcctggggatcaaagagggaagagtattgtgagtctggagctaacaacttgtgtttcagatgtcactgcagtgatattatttttcttcacgttctttatcaccaccatggttatgttggctgccctggctcaccatttgttttactgggatgtttggtttatatataatgtgtgtttagctaagataaaaggctacaggtctctttccacatcccaaactttctatgatgcttacatttcttatgacaccaaagatgcctctgttactgactgggtgataaatgagctgcgctaccaccttgaagagagccgagacaaaaacgttctcctttgtctagaggagagggattgggacccgggattggccatcatcgacaacctcatgcagagcatcaaccaaagcaagaaaacagtatttgttttaaccaaaaaatatgcaaaaagctggaactttaaaacagctttttacttggctttgcagaggctaatggatgagaacatggatgtgattatatttatcctgctggagccagtgttacagcattctcagtatttgaggctacggcagcggatctgtaagagctccatcctccagtggcctgacaacccgaaggcagaaggcttgttttggcaaactctgagaaatgtggtcttgactgaaaatgattcacggtataacaatatgtatgtcgattccattaagcaatactaactgacgttaagtcatgatttcgcgccataataaaga

SEQ ID NO: 30 - protein, 1059 aa, Homo Sapiens [sequence omitted]

SEQ ID NO: 31 - DNA, 2085 bp, Homo Sapiens
  CDS (76)...(1407)
gcatttcttccttctgcgtatgggacaggaccctttctggaatgggggtcttatgacctacaatcaaacaagaacatggacttcccgtgcctctggctagggctgttgctgcctttggtagctgcgctggatttcaactaccaccgccaggaagggatggaagcgtttttgaagactgttgcccaaaactacagttctgtcactcacttacacagtattgggaaatctgtgaaaggtagaaacctgtgggttcttgttgtggggcggtttccaaaggaacacagaattgggattccagagttcaaatacgtggcaaatatgcatggagatgagactgttgggcgggagctgctgctccatctgattgactatctcgtaaccagtgatggcaaagaccctgaaatcacaaatctgatcaatagtacccggatacacatcatgccttccatgaacccagatggatttgaagccgtcaaaaagcctgactgttactacagcatcggaagggaaaattataaccagtatgacttgaatcgaaatttccccgatgcttttgaatataataatgtctcaaggcagcctgaaactgtggcagtcatgaagtggctgaaaacagagacgtttgtcctctctgcaaacctccatggtggtgccctcgtggccagttacccatttgataatggtgttcaagcaactggggcattatactcccgaagcttaacgcctgatgatgatgtttttcaatatcttgcacatacctatgcttcaagaaatcccaacatgaagaaaggagacgagtgtaaaaacaaaatgaactttcctaatggtgttacaaatggatactcttggtatccactccaaggtggaatgcaagattacaactacatctgggcccagtgttttgaaattacgttggagctgtcatgctgtaaatatcctcgtgaggagaagcttccatccttttggaataataacaaagcctcattaattgaatatataaagcaggtgcacctaggtgtaaagggtcaagtttttgatcagaatggaaatccattacccaatgtaattgtggaagtccaagacagaaaacatatctgcccctatagaaccaacaaatatggagagtattatctccttctcttgcctgggtcttatattataaatgttacagtccctggacatgatccacacatcacaaaggtgattattccggagaaatcccagaacttcagtgctcttaaaaaggatattctacttccattccaagggcaattggattctatcccagtatcaaatccttcatgcccaatgattcctctatacagaaatttgccagaccactcagctgcaacaaagcctagtttgttcttatttttagtgagtcttttgcacatattcttcaaataaagtaaaatgtgaaactcaacccacatcaccacctggaatcagggattgctcactccaggttactgcaaccctaactcactctagtgggaccttgactggagaaactccacgatcttcctgaagaagagaaatggatgtttccaaattccacaataagcaatatgtggtgataatgaaaagaatgattcagtcttgacggtgaatggaagacacttacctaacaagtactgctcatttacactcaaattaatcttgaagtagtcttaaaatgtgtaagaagttaaaacttgagaagcaaaaaatgcctgcaaaaagaagatcattttgtatacagagaaccggatgaatataagcaatgaagatgaacatttattgatcttctacatacaagacttcaccataaggccaggagcagtgctcacgccttgtaatcccagcactttgggaggccaaggtgggcggatcaccttgaggtcaggagttcaagaccagcctgaccaacatggtgaaaccctgtctctactaaatattagcggggtgtggtggcgggcacctgtagtcgcagcctttcgggaggctgagacaggagaatcgcttgaaccctagaggcggagtttgcagtgagccgagatagtgccattgtactccagcttgggcaacagagtaagactctgtctc

SEQ ID NO: 32 - protein, 443 aa, Homo Sapiens
MDFPCLWLGLLLPLVAALDFNYHRQEGMEAFLKTVAQNYSSVTHLHSIGKSVKGRNLWVLVVGRFPKEHRIGIPEFKYVANMHGDETVGRELLLHLIDYLVTSDGKDPEITNLINSTRIHIMPSMNPDGFEAVKKPDCYYSIGRENYNQYDLNRNFPDAFEYNNVSRQPETVAVMKWLKTETFVLSANLHGGALVASYPFDNGVQATGALYSRSLTPDDDVFQYLAHTYASRNPNMKKGDECKNKMNFPNGVTNGYSWYPLQGGMQDYNYIWAQCFEITLELSCCKYPREEKLPSFWNNNKASLIEYIKQVHLGVKGQVFDQNGNPLPNVIVEVQDRKHICPYRTNKYGEYYLLLLPGSYIINVTVPGHDPHITKVIIPEKSQNFSALKKDILLPFQGQLDSIPVSNPSCPMIPLYRNLPDHSAATKPSLFLFLVSLLHIFFK

SEQ ID NO: 33 - DNA, 1408 bp, Homo Sapiens
  CDS (104)...(1006)
aaacagaaggggaggtgcagtttcagaacccagccagcctctctcttgctgcctagcctcctgccggcctcatcttcgcccagccaaccccgcctggagccctatggccaactgcgagttcagcccggtgtccggggacaaaccctgctgccggctctctaggagagcccaactctgtcttggcgtcagtatcctggtcctgatcctcgtcgtggtgctcgcggtggtcgtcccgaggtggcgccagcagtggagcggtccgggcaccaccaagcgctttcccgagaccgtcctggcgcgatgcgtcaagtacactgaaattcatcctgagatgagacatgtagactgccaaagtgtatgggatgctttcaagggtgcatttatttcaaaacatccttgcaacattactgaagaagactatcagccactaatgaagttgggaactcagaccgtaccttgcaacaagattcttctttggagcagaataaaagatctggcccatcagttcacacaggtccagcgggacatgttcaccctggaggacacgctgctaggctaccttgctgatgacctcacatggtgtggtgaattcaacacttccaaaataaactatcaatcttgcccagactggagaaaggactgcagcaacaaccctgtttcagtattctggaaaacggtttcccgcaggtttgcagaagctgcctgtgatgtggtccatgtgatgctcaatggatcccgcagtaaaatctttgacaaaaacagcacttttgggagtgtggaagtccataatttgcaaccagagaaggttcagacactagaggcctgggtgatacatggtggaagagaagattccagagacttatgccaggatcccaccataaaagagctggaatcgattataagcaaaaggaatattcaattttcctgcaagaatatctacagacctgacaagtttcttcagtgtgtgaaaaatcctgaggattcatcttgcacatctgagatctgagccagtcgctgtggttgttttagctccttgactccttgtggtttatgtcatcatacatgactcagcatacctgctggtgcagagctgaagattttggagggtcctccacaataaggtcaatgccagagacggaagcctttttccccaaagtcttaaaataacttatatcatcagcatacctttattgtgatctatcaatagtcaagaaaaattattgtataagattagaatgaaaattgtatgttaagttacttcactttaattctcatgtgatccttttatgttatttatatattggtaacatcctttctattgaaaaatcaccacaccaaacctctcttattagaacaggcaagtgaagaaaagtgaatgctcaagtttttcagaaagcattacatttcc

SEQ ID NO: 34 - protein, 300 aa, Homo Sapiens
MANCEFSPVSGDKPCCRLSRRAQLCLGVSILVLILVVVLAVVVPRWRQQWSGPGTTKRFPETVLARCVKYTEIHPEMRHVDCQSVWDAFKGAFISKHPCNITEEDYQPLMKLGTQTVPCNKILLWSRIKDLAHQFTQVQRDMFTLEDTLLGYLADDLTWCGEFNTSKINYQSCPDWRKDCSNNPVSVFWKTVSRRFAEAACDVVHVMLNGSRSKIFDKNSTFGSVEVHNLQPEKVQTLEAWVIHGGREDSRDLCQDPTIKELESIISKRNIQFSCKNIYRPDKFLQCVKNPEDSSCTSEI

SEQ ID NO: 35 - DNA, 769 bp, Homo Sapiens
  CDS (16)...(759)
agcctctctgggaagatgctgcttcttcctctccccctgctgctctttctcttgtgctccagagctgaagctggggagatcatcgggggcacagaatgcaagccacattcccgcccctacatggcctacctggaaattgtaacttccaacggtccctcaaaattttgtggtggtttccttataagacggaactttgtgctgacggctgctcattgtgcaggaaggtctataacagtcacccttggagcccataacataacagaggaagaagacacatggcagaagcttgaggttataaagcaattccgtcatccaaaatataacacttctactcttcaccacgatatcatgttactaaagttgaaggagaaagccagcctgaccctggctgtggggacactccccttcccatcacaattcaactttgtcccacctgggagaatgtgccgggtggctggctggggaagaacaggtgtgttgaagccgggctcagacactctgcaagaggtgaagctgagactcatggatccccaggcctgcagccacttcagagactttgaccacaatcttcagctgtgtgtgggcaatcccaggaagacaaaatctgcatttaagggagactctgggggccctcttctgtgtgctggggtggcccagggcatcgtatcctatggacggtcggatgcaaagccccctgctgtcttcacccgaatctcccattaccggccctggatcaaccagatcctgcaggcaaattaatcctggatcc

SEQ ID NO: 36 - protein, 247 aa, Homo Sapiens
MLLLPLPLLLFLLCSRAEAGEIIGGTECKPHSRPYMAYLEIVTSNGPSKFCGGFLIRRNFVLTAAHCAGRSITVTLGAHNITEEEDTWQKLEVIKQFRHPKYNTSTLHHDIMLLKLKEKASLTLAVGTLPFPSQFNFVPPGRMCRVAGWGRTGVLKPGSDTLQEVKLRLMDPQACSHFRDFDHNLQLCVGNPRKTKSAFKGDSGGPLLCAGVAQGIVSYGRSDAKPPAVFTRISHYRPWINQILQAN

SEQ ID NO: 37 - DNA, 1272 bp, Homo Sapiens
  CDS (212)...(1072)
aggaggagagccactgtggtctgaagagatgctactgcctggagactggggtcttaacctccagcctggcactgagccacctgcaacctagcagcaggtgaccttggctcccagcctgactcagctgaacctggatcctgtgcataggcaagagctgactctgagccctggcccagccaagctgacccctacactagaccctacacaccggatggagctgatcctgagtaccagcccagctgagctgactctggatcctgcgtgccagccaaagctgcccctggattccacatgccaaccagagatgaccttcaatcctggtccaactgagcttaccctggatcctgaacaccagccagaggagaccccagctcctagcctggctgagttgaccctggagcctgtgcaccgccgacccgagctcctggatgcttgtgctgacctcatcaatgatcagtggccccgcagccgcacctcccgcctgcactccctgggccagtcctcagatgccttccccctctgcctgatgctgctaagcccccaccccacacttgaagcagcacccgttgtggtgggccatgcccgcctgtcacgggtgctgaaccagccccagagcctcttagtggagacagtggtggtggcccgggccctgaggggccgtggctttggccgccgcctcatggagggcctggaggtctttgctcgggcccggggcttccgcaagctgcatctcaccacccatgaccaggtgcacttctatacccacctgggctaccagctgggtgagcctgtgcagggcctggtcttcaccagcagacggctgcctgccaccctgcttaatgccttccccacagccccctctccccggccacccaggaaggccccaaacctgactgcccaagctgccccaaggggtcccaagggacctccattgccaccaccccctcccctacctgagtgcctgaccatctcacccccagttccatcagggcccccttcaaaaagcctgctggagacacaatatcaaaatgtgagggggcgccccatattctggatggaaaaagacatctgaggccatccagggcaaggaactgtctttctggttcaatagactgccccgacagtctacaagcctcagcccactgaccatacctcagcccctagcccctggggggcagctttaacctgggcatgtttcctgggtaccagtggggccaggaggtggctctggctcagagccgtcagtgtggctgaataaaggctctcttgggt

SEQ ID NO: 38 - protein, 286 aa, Homo Sapiens
MELILSTSPAELTLDPACQPKLPLDSTCQPEMTFNPGPTELTLDPEHQPEETPAPSLAELTLEPVHRRPELLDACADLINDQWPRSRTSRLHSLGQSSDAFPLCLMLLSPHPTLEAAPVVVGHARLSRVLNQPQSLLVETVVVARALRGRGFGRRLMEGLEVFARARGFRKLHLTTHDQVHFYTHLGYQLGEPVQGLVFTSRRLPATLLNAFPTAPSPRPPRKAPNLTAQAAPRGPKGPPLPPPPPLPECLTISPPVPSGPPSKSLLETQYQNVRGRPIFWMEKDI

SEQ ID NO: 39 - DNA, 3386 bp, Homo Sapiens
  CDS (223)...(1410)
gacacatcccgtgttccatccactccctcccttctcagcagtcctcgcctgttctcacgtgctcacaggcagttaggcagaagtgatccccgtggctctgccaaagacaagcctgttgggttgaaagaagaagaagaagaagaagaagaaaaaaaaactcaggcaaagtcacagcctcaaaattgttcactgaaagaagcgtgagtggagaagtgtgagaagatgaatggaccggtggatggcttgtgtgaccactctctaagtgaaggagtcttcatgttcacatcggagtctgtgggagagggacacccggataagatctgtgaccagatcagtgatgcagtgctggatgcccatctcaagcaagaccccaatgccaaggtggcctgtgagacagtgtgcaagaccggcatggtgctgctgtgtggtgagatcacctcaatggccatggtggactaccagcgggtggtgagggacaccatcaagcacatcggctacgatgactcagccaagggctttgacttcaagacttgcaacgtgctggtggctttggagcagcaatccccagatattgcccagtgcgtccatctggacagaaatgaggaggatgtgggggcaggagatcagggtttgatgttcggctatgccaccgacgagacagaggagtgcatgcccctcaccatcatccttgctcacaagctcaacgcccggatggcagacctcaggcgctccggcctcctcccctggctgcggcctgactctaagactcaggtgacagttcagtacatgcaggacaatggcgcagtcatccctgtgcgcatccacaccatcgtcatctctgtgcagcacaacgaagacatcacgctggaggagatgcgcagggccctgaaggagcaagtcatcagggccgtggtgccggccaagtacctggacgaagacaccgtctaccacctgcagcccagtgggcggtttgtcatcggaggtccccagggggatgcgggtgtcactggccgtaagattattgtggacacctatggcggctggggggctcatggtggtggggccttctctgggaaggactacaccaaggtggaccgctcagccgcttatgctgcccgctgggtggccaagtctctggtgaaagcagggctctgccggagagtgcttgtccaggtttcctatgccattggtgtggccgagccgctgtccatttccatcttcacctacggaacctctcagaagacagagcgagagctgctggatgtggtgcataagaacttcgacctccggccgggcgtcattgtcagggatttggacttgaagaagcccatctaccagaagacagcatgctacggccatttcggaagaagcgagttcccatgggaggttcccaggaagcttgtattttagagccagggggagctgggcctggtctcaccctggaggcacctggtggccatgctcctcttccccagacgcctggctgctgatcgccttccccacccaccaaccctcagggcaaagccaggtccctctcatttagcctgtcctgtcatcatcatggccagctggaggcaggggcttcctggtgctggaggttggatcttgatgtaaggatgggcatggtgttctcctgctgctccctcagactggggcaatgttaatttagtggaaaaggcacccccgtcaagagtgaattccctcactcgtctcccccaacagctggaccctgaccagctccccctccctccccttgcctgtgccaggtgaggtcagcacatctcaacaggcctcagggctccttgtgggccagggctcctggacccccctttcacaggcagccagtgccctgagccagggtctccagaaagccccacccaggccaggcatgtggcaggggttagagcaggactgatgtctcctaagcacctgtaatgtgcgagggacccagctaataactgatctcgttttttcttcactgcaacatgatgaggtagtaccttttatatcccatttatagatgggggaaagcaaagcacagagagtctggataacttccacagggtcccacagccacgtgtttagacctagatgtataactaggagctttgactcaggagcctgtgacataccccctcccccaccgttgtctcatgccagtaacaggctcaaacaatgacaaagcagattcagaaatgaggccatggactctgtcctgaaggcctgaggttactggaaattaggggattaacccactagctcttgttgagccgtgggcaattgtctgaaaagtgaagacagaaccacagggctattttgtttgcttcatgtgtcccagaagatgactgagggtgagttggcttacctggcccatcagggtaggctggagttagggactgaccagcagctttagaatcccagccccctgaccactcagagacatgcagagattgggtttttggacttctggggtaagtggtctaagtccagtccagtcctatctgggcttcctggagcagaagcagcaacttgtcctagcacagatggccagccccttagacagaggccctcaagtctttctctttccctggtcccttgtatcccctgcaggctgagtgcatttggagggagtgagtggccctttcggatccagggaggctggtcctatggcctcatgttaaataggcggggcttgccttctggtgtcggacaagcttctgagacgtcatgaggagattctgcctttgccaggtgactgtctggggagcgggtctgctcccaaggggcctgagcagtccttggcctgctaaggtcttggaacttgcctgcctttccatccatggccagcagcacctgccctacctgccccacttgtccttagcctggacctctgacagcagcatctctaccttctccccagctcccaggaccacaggctcaggcaggggcctccatgggccccaggggaacactggggacttggcctctctctagggtacatggtgctgggagaggcagcccaggaagtctcatctggggagcaggcagccagcatctgggccttggcctggagcacaaagaccctggctttcattttctctcaggtgaaaggaaattaaggcaacaaaagaagcccggctcctggtcacctaggaagcctcagattccttcccatggagggagggagtggtttgcaggtggccaagttcctctaacttggctcacactcgacatgaaaattcagaattttatactttccctaccctctagagaaataagatcttttttgtcagtttgtttgtatgaaactaaagcctttatttgttaatagttcctgctaaaacaatgaataaaaactcaaggagcaactaaaaaaaaaaaaaaaa

SEQ ID NO: 40 - protein, 395 aa, Homo Sapiens
MNGPVDGLCDHSLSEGVFMFTSESVGEGHPDKICDQISDAVLDAHLKQDPNAKVACETVCKTGMVLLCGEITSMAMVDYQRVVRDTIKHIGYDDSAKGFDFKTCNVLVALEQQSPDIAQCVHLDRNEEDVGAGDQGLMFGYATDETEECMPLTIILAHKLNARMADLRRSGLLPWLRPDSKTQVTVQYMQDNGAVIPVRIHTIVISVQHNEDITLEEMRRALKEQVIRAVVPAKYLDEDTVYHLQPSGRFVIGGPQGDAGVTGRKIIVDTYGGWGAHGGGAFSGKDYTKVDRSAAYAARWVAKSLVKAGLCRRVLVQVSYAIGVAEPLSISIFTYGTSQKTERELLDVVHKNFDLRPGVIVRDLDLKKPIYQKTACYGHFGRSEFPWEVPRKLVF

SEQ ID NO: 41 - DNA, 4170 bp, Homo Sapiens
  CDS (101)...(4117)
gcgccccactcggcgggtcggtgccgccgggtcccaggtgcccgctacttcccagaactcgcctcccgctccgggccctcgaaccagcgcggacaccacaatggaccgggcgtccgagctgctcttctacgtgaacggccgcaaggtgatagaaaaaaatgtcgatcctgaaacaatgctgttgccttatttgaggaagaagcttcgactcacaggaactaagtatggctgtggaggaggaggctgtggtgcttgtacagtgatgatatcacgatacaaccccatcaccaagaggataaggcatcacccagccaatgcctgtctgattcccatctgttctctgtatggtgctgccgtcaccacagtagaaggcataggaagcacccacaccagaattcatcctgttcaggagaggattgccaagtgtcatggcacccagtgtggcttctgcacacctgggatggtgatgtccatctacacgctgctcaggaaccacccagagcccactctggatcagttaactgatgcccttggtggtaacctgtgccgttgcactggatacaggcccataattgatgcatgcaagactttctgtaaaacttcgggctgctgtcaaagtaaagaaaatggggtttgctgtttggatcaaggaatcaatggattgccagaatttgaggaaggaagtaagacaagtccaaaactcttcgcagaagaggagtttctgccattggatccaacccaggaactgatatttcctcctgagctaatgataatggctgagaaacagtcgcaaaggaccagggtgtttggcagtgagagaatgatgtggttttcccccgtgaccctgaaggaactgctggaatttaaattcaagtatccccaggctcctgttatcatgggaaacacctctgtggggcctgaagtgaaatttaaaggcgtctttcacccagttataatttctcctgatagaattgaagaactgagtgttgtaaaccatgcatataatggactcacccttggtgctggtctcagcctagcccaggtgaaggacattttggctgatgtagtccagaagcttccagaggagaagacacagatgtaccatgctctcctgaagcatttgggaactctggctgggtcccagatcaggaacatggcttctttagggggacacatcattagcaggcatccagattcagatctgaatcccatcctggctgtgggtaactgtaccctcaacttgctatcaaaagaaggaaaacgacagattcctttaaatgagcaattcctcagcaagtgccctaatgcagatcttaagcctcaagaaatcttggtctcagtgaacatcccctactcaaggaagtgggaatttgtgtcagccttccgacaagcccagcgacaggagaatgcgctagcgatagtcaattcaggaatgagagtcttttttggagaaggggatggcattattagagagttatgcatctcatatggaggcgttggtccagccaccatctgtgccaagaattcctgccagaaactcattggaaggcactggaacgaacagatgctggatatagcctgcaggcttattctgaatgaagtctcccttttgggctcggcgccaggtgggaaagtggagttcaagaggactctcatcatcagcttcctcttcaagttctacctggaagtgtcacagattttgaaaaagatggatccagttcactatcctagccttgcagacaagtatgaaagtgctttagaagatcttcattccaaacatcactgcagtacattaaagtaccagaatataggcccaaagcagcatcctgaagacccaattggccaccccatcatgcatctgtctggtgtgaagcatgccacgggggaggccatctactgtgatgacatgcctctggtggaccaggaacttttcttgacttttgtgactagttcaagagctcatgctaagattgtgtctattgatctgtcagaagctctcagcatgcccggtgtggtggacatcatgacagcagaacatcttagtgacgtcaactccttctgcttttttactgaagctgagaaatttctggcgacagataaggtgttctgtgtgggtcagcttgtctgtgctgtgcttgccgattctgaggttcaggcaaagcgagctgctaagcgagtgaagattgtctatcaagacttggagccgctgatactaacaattgaggaaagtatacaacacaactcctccttcaagccagaaaggaaactggaatatggaaatgttgacgaagcatttaaagtggttgatcaaattcttgaaggtgaaatacatatgggaggtcaagaacatttttatatggaaacccaaagcatgcttgtcgttcccaagggagaggatcaagaaatggatgtctacgtgtccacacagtttcccaaatatatacaggacattgttgcctcaaccttgaagctcccagctaacaaggtcatgtgccatgtaaggcgtgttggtggagcgtttggagggaaggtgttaaaaaccggaatcattgcagccgtcactgcatttgccgcaaacaaacatggccgtgcagttcgctgtgttctggaacgaggagaagacatgttaataactggaggccgccatccttaccttggaaagtacaaagctggattcatgaacgatggcagaatcttggccctggacatggagcattacagcaatgcaggcgcctccttggatgaatcattattcgtgatagaaatgggacttctgaaaatggacaatgcttacaagtttcccaatctccgctgccggggttgggcatgcagaaccaaccttccatccaacacagcttttcgtgggtttggctttcctcaggcagcgctgatcaccgaatcttgtatcacggaagttgcagccaaatgtggactatcccctgagaaggtgcgaatcataaacatgtacaaggaaattgatcaaacaccctacaaacaagagatcaatgccaagaacctaatccagtgttggagagaatgtatggccatgtcttcctactccttgaggaaagttgctgtggaaaagttcaatgcagagaattattggaagaagaaaggactggccatggtccccctgaagtttcctgttggccttggctcacgtgctgctggtcaggctgctgccttggttcacatttatcttgatggctctgtgctggtcactcacggtggaattgaaatggggcagggggtccacactaaaatgattcaggtggtcagccgtgaattaagaatgccaatgtcgaatgtccacctgcgtggaacaagcacagaaactgtccctaatgcaaatatctctggaggttctgtggtggcagatctcaacggtttggcagtaaaggatgcctgtcaaactcttctaaaacgcctcgaacccatcatcagcaagaatcctaaaggaacttggaaagactgggcacagactgcttttgatgaaagcattaacctttcagctgttggatacttcagaggttatgagtcagacatgaactgggagaaaggcgaaggccagcccttcgaatactttgtttatggagctgcctgttccgaggttgaaatagactgcctgacgggggatcataagaacatcagaacagacattgtcatggatgttggctgcagtataaatccagccattgacataggccagattgaaggtgcatttattcaaggcatgggactttatacaatagaggaactgaattattctccccagggcattctgcacactcgtggtccagaccaatataaaatccctgccatctgtgacatgcccacggagttgcacattgctttgttgcctccttctcaaaactcaaatactctttattcatctaagggtctgggagagtcgggggtgttcctggggtgttccgtgtttttcgctatccatgacgcagtgagtgcagcacgacaggagagaggcctgcatggacccttgacccttaatagtccactgaccccggagaagattaggatggcctgtgaagacaagttcacaaaaatgattccgagagatgaacctggatcctacgttccttggaatgtacccatctgaatcaaatgcaaacttctggagaaaacagagtgcctcttcccagatggcaatct

SEQ ID NO: 42 - protein, 1338 aa, Homo Sapiens
MDRASELLFYVNGRKVIEKNVDPETMLLPYLRKKLRLTGTKYGCGGGGCGACTVMISRYNPITKRIRHHPANACLIPICSLYGAAVTTVEGIGSTHTRIHPVQERIAKCHGTQCGFCTPGMVMSIYTLLRNHPEPTLDQLTDALGGNLCRCTGYRPIIDACKTFCKTSGCCQSKENGVCCLDQGINGLPEFEEGSKTSPKLFAEEEFLPLDPTQELIFPPELMIMAEKQSQRTRVFGSERMMWFSPVTLKELLEFKFKYPQAPVIMGNTSVGPEVKFKGVFHPVIISPDRIEELSVVNHAYNGLTLGAGLSLAQVKDILADVVQKLPEEKTQMYHALLKHLGTLAGSQIRNMASLGGHIISRHPDSDLNPILAVGNCTLNLLSKEGKRQIPLNEQFLSKCPNADLKPQEILVSVNIPYSRKWEFVSAFRQAQRQENALAIVNSGMRVFFGEGDGIIRELCISYGGVGPATICAKNSCQKLIGRHWNEQMLDIACRLILNEVSLLGSAPGGKVEFKRTLIISFLFKFYLEVSQILKKMDPVHYPSLADKYESALEDLHSKHHCSTLKYQNIGPKQHPEDPIGHPIMHLSGVKHATGEAIYCDDMPLVDQELFLTFVTSSRAHAKIVSIDLSEALSMPGVVDIMTAEHLSDVNSFCFFTEAEKFLATDKVFCVGQLVCAVLADSEVQAKRAAKRVKIVYQDLEPLILTIEESIQHNSSFKPERKLEYGNVDEAFKVVDQILEGEIHMGGQEHFYMETQSMLVVPKGEDQEMDVYVSTQFPKYIQDIVASTLKLPANKVMCHVRRVGGAFGGKVLKTGIIAAVTAFAANKHGRAVRCVLERGEDMLITGGRHPYLGKYKAGFMNDGRILALDMEHYSNAGASLDESLFVIEMGLLKMDNAYKFPNLRCRGWACRTNLPSNTAFRGFGFPQAALITESCITEVAAKCGLSPEKVRIINMYKEIDQTPYKQEINAKNLIQCWRECMAMSSYSLRKVAVEKFNAENYWKKKGLAMVPLKFPVGLGSRAAGQAAALVHIYLDGSVLVTHGGIEMGQGVHTKMIQVVSRELRMPMSNVHLRGTSTETVPNANISGGSVVADLNGLAVKDACQTLLKRLEPIISKNPKGTWKDWAQTAFDESINLSAVGYFRGYESDMNWEKGEGQPFEYFVYGAACSEVEIDCLTGDHKNIRTDIVMDVGCSINPAIDIGQIEGAFIQGMGLYTIEELNYSPQGILHTRGPDQYKIPAICDMPTELHIALLPPSQNSNTLYSSKGLGESGVFLGCSVFFAIHDAVSAARQERGLHGPLTLNSPLTPEKIRMACEDKFTKMIPRDEPGSYVPWNVPI

SEQ ID NO: 43 - DNA, 1981 bp, Homo Sapiens
  CDS (15)...(1418)
ggactccaagcgccatggccgctgccgcccgagcccgggtcgcgtacttgctgaggcaactgcaacgcgcagcgtgccagtgcccaactcattctcatacttactcccaagcccctggactttcaccttctgggaaaacaacagattatgcctttgagatggctgtttcaaatattagatatggagcagcagttacaaaggaagtaggaatggacctaaaaaacatgggtgctaaaaatgtgtgcttgatgacagacaagaacctctccaagctccctcctgtgcaagtagctatggattccctagtgaagaatggcatcccctttacggtttatgataatgtgagagtggaaccaacggattcaagcttcatggaagctattgagtttgcccaaaagggagcttttgatgcctatgttgctgtcggtggtggctctaccatggacacctgtaaggctgctaatctgtatgcatccagccctcattctgatttcctagattatgtcagtgcccccattggcaagggaaagcctgtgtctgtgcctcttaagcctctgattgcagtgccaactacctcaggaaccgggagtgaaactactggggttgccatttttgactatgaacacttgaaagtaaaaattggcatcacttcgagagccatcaaacccacactgggactgattgatcctctgcacaccctccacatgcctgcccgagtggtcgccaacagtggctttgatgtgctttgccatgccctggagtcatacaccaccctgccctaccacctgcggagcccctgcccttcaaatcccatcacacggcctgcgtaccagggcagcaacccaatcagtgacatttgggctatccacgcgctgcggatcgtggctaagtatctgaagagggctgtcagaaatcccgatgatcttgaagcaaggtctcatatgcacttggcaagtgcttttgctggcatcggctttggaaatgctggtgttcatctgtgccatggaatgtcttacccaatttcaggtttagtgaagatgtataaagcaaaggattacaatgtggatcacccactggtgccccatggcctttctgtggtgctcacgtccccagcggtgttcactttcacggcccagatgtttccagagcgacacctggagatggcagaaatactgggagccgacacccgcactgccaggatccaagatgcagggctggtgttggcagacacgctccggaaattcttattcgatctggatgttgatgatggcctagcagctgttggttactccaaagctgatatccccgcactagtgaaaggaacgctgccccaggaaagggtcaccaagcttgcaccctgtccccagtcagaagaggatctggctgctctgtttgaagcttcaatgaaactgtattaattgtcattttaactgaaagaattaccgctggccattgtagtgctgagagcaagagctgatctagctagggctttgtcttttcatctttgcgcataacttacctgttaccagtataggtgggatatacatttatcttgcaggaaattccccaaagctcagagtccagttccttccataaaacaggctggacaaatgaccactatgttagacccccaggctcgacttcaggggtcagtgttcctgtcccaaaccccacacagaatactctgcctctgyttcatgtagcaaatgagcaaaaactcagtatctatcaaaagtgtaaattatatttcctatgcctagtaattcacttcatgtctaaaaatttatctgatagaaacactagcaccagtacatacagaagcatggcaaggatgtttctggcagcacttttctaataataaaagatttgaaacaacmwwaarwawwmawwawwrrwawawaraksacttatagtatactagacagtggaatactatggtactgttaataaagatgaagtaaatctcttggaaaaaaaaaaa

SEQ ID NO: 44 - protein, 467 aa, Homo Sapiens
MAAAARARVAYLLRQLQRAACQCPTHSHTYSQAPGLSPSGKTTDYAFEMAVSNIRYGAAVTKEVGMDLKNMGAKNVCLMTDKNLSKLPPVQVAMDSLVKNGIPFTVYDNVRVEPTDSSFMEAIEFAQKGAFDAYVAVGGGSTMDTCKAANLYASSPHSDFLDYVSAPIGKGKPVSVPLKPLIAVPTTSGTGSETTGVAIFDYEHLKVKIGITSRAIKPTLGLIDPLHTLHMPARVVANSGFDVLCHALESYTTLPYHLRSPCPSNPITRPAYQGSNPISDIWAIHALRIVAKYLKRAVRNPDDLEARSHMHLASAFAGIGFGNAGVHLCHGMSYPISGLVKMYKAKDYNVDHPLVPHGLSVVLTSPAVFTFTAQMFPERHLEMAEILGADTRTARIQDAGLVLADTLRKFLFDLDVDDGLAAVGYSKADIPALVKGTLPQERVTKLAPCPQSEEDLAALFEASMKLY

SEQ ID NO: 45 - DNA, 11580 bp, Homo Sapiens
  CDS (176)...(10558)
cacgcgtgggctcggcgggggcccgctcccaggcccgctcccgagcccgttccgctcccgtccgccttcttctcgccttctctccgcgtggctcctccgtcccggcgtctccaaaactgaatgagcgagcggcgcgtagggcgscggcggcggcggcggcggcggcggcggcggcatggagcgcagtggctgggcccggcagactttcctcctagcgctgttgctgggggcgacgctgagggcgcgcgcggcggctggctattacccccgcttttcgcccttctttttcctgtgcacccaccacggggagctggaaggggatggggagcagggcgaggtgctcatttccctgcatattgcgggcaaccccacctactacgttccgggacaagaataccatgtgacaatttcaacaagcaccttttttgacggcttgctggtgacaggactatacacatctacaagtgttcaggcatcacagagcattggaggttccagtgctttcggatttgggatcatgtctgaccaccagtttggtaaccagtttatgtgcagtgtggtagcctctcacgtgagtcacctgcccacaaccaacctcagtttcatctggattgctccacctgcgggcacaggctgtgtgaatttcatggctacagcaacacaccggggccaggttattttcaaagatgctttagcccagcagttgtgtgaacaaggagctccaacagatgtcactgtgcacccacatctagctgaaatacatagtgacagcattatcctgagagatgactttgactcctaccaccaactgcaattaaatccaaatatatgggttgaatgtaacaactgtgagactggagaacagtgtggcgcgattatgcatggcaatgccgtcaccttctgtgaaccatatggcccacgagaactgattaccacaggccttaatacaacaacagcttctgtcctccaattttccattgggtcaggttcatgtcgctttagttattcagaccccagcatcatcgtgttatatgccaagaataactctgcggactggattcagctagagaaaattagagccccttccaatgtcagcacaatcatccatatcctctaccttcctgaggacgccaaaggggagaatgtccaatttcagtggaagcaggaaaatcttcgtgtaggtgaagtgtatgaagcctgctgggccttagataacatcttgatcatcaattcagctcacagacaagtcgttttagaagatagtctcgacccagtggacacaggcaactggcttttcttcccaggagctacagttaagcatagctgtcagtcagatgggaactccatttatttccatggaaatgaaggcagcgagttcaattttgccaccaccagggatgtagatctttccacagaagatattcaagagcaatggtcagaagaatttgagagccagcctacaggatgggatgtcttgggagctgtcattggtacagaatgtggaacgatagaatcaggcttatcaatggtcttcctcaaagatggagagaggaaattatgcactccatccatggacactaccggttatgggaacctgaggttttactttgtgatgggaggaatttgtgaccctggaaattctcatgaaaatgacataatcctgtatgcaaaaattgaaggaagaaaagagcatataacactggataccctttcctattcctcatataaggttccgtctttggtttctgtggtcatcaatcctgaacttcagactcctgctaccaaattttgtctcaggcaaaagaaccatcaaggacataataggaatgtctgggctgtagactttttccatgtcttgcctgttctcccttctacaatgtctcacatgatacagttttccatcaatctgggatgtggaacgcatcagcctggtaacagtgtcagcttggaattttctaccaaccatgggcgctcctggtccctccttcacactgaatgcttacctgagatctgtgctggaccccacctcccccacagcactgtctactcctctgaaaactacagtgggtggaaccgaataacaattccccttcctaacgcagcactaacccggaacaccaggattcgctggagacaaacaggaccaatccttggaaacatgtgggcaattgataatgtttatattggcccgtcatgtctcaaattctgttctggcagaggacagtgcactagacatggttgcaagtgtgaccctggattttctggcccagcttgtgagatggcatcccagacattcccaatgtttatttctgaaagctttggcagttccaggctctcctcttaccataacttttactctatccgtggtgctgaagtcagctttggttgtggtgtcttggccagtggtaaggccctggttttcaacaaagaagggcggcgtcagctaattacatctttccttgacagctcacaatccaggtttctccagttcacactgagactggggagcaaatctgttctgagcacgtgcagagcccctgatcagcctggtgaaggagttttgctgcattattcttatgataatgggataacttggaaactcctggagcattattcatatctcagctatcatgagcccagaataatctccgtagaactaccaggtgatgcaaagcagtttggaattcagttcagatggtggcaaccgtatcattcttcccagagagaagatgtatgggctattgatgagattatcatgacatctgtgcttttcaacagcattagtcttgactttaccaatcttgtggaggtcactcagtctctgggattctaccttggaaatgttcagccatactgtggccacgactggaccctttgttttacaggagattctaaacttgcctcaagtatgcgctatgtggaaacacaatcaatgcagataggagcatcctatatgattcagttcagtttggtgatgggatgtggccagaaatacaccccacacatggacaaccaggtgaagctggagtactcaaccaaccacggccttacctggcacctcgtccaagaagaatgccttccaagtatgccaagttgtcaggaatttacatcagcaagtatttaccatgccagtgagtttacacagtggaggagagtcatagtgcttcttccccagaaaacttggtccagtgctacccgtttccgctggagccagagctattacacagctcaagacgagtgggctttggacagcatttacattgggcagcagtgccccaacatgtgcagtgggcatggctcatgcgatcatggcatatgcaggtgtgaccaggggtaccaaggcactgaatgccacccagaagctgcccttccgtccacaattatgtcagattttgagaaccagaatggctgggagtctgactggcaagaagttattgggggagaaattgtaaaaccagaacaagggtgtggtgtcatctcttctggatcatctctgtacttcagcaaggctgggaaaagacagctggtgagttgggacctggatacttcttgggtggactttgtccagttctacatccagataggcggagagagtgcttcatgcaacaagcctgacagcagagaggagggcgtcctccttcagtacagcaacaatgggggcatccagtggcacctgctagcagagatgtacttttcagacttcagcaaacccagatttgtctatctggagcttccagctgctgccaagaccccttgcaccaggttccgctggtggcagcccgtgttctcaggggaggactatgaccagtgggcagtcgatgacatcatcattctgtccgagaagcagaagcagatcatcccagttatcaatccaactttacctcagaacttttatgagaagccagcttttgattaccctatgaatcagatgagtgtgtggttgatgttggctaatgaaggaatggttaaaaatgaaaccttctgtgctgccacaccatcagcaatgatatttggaaaatcagatggagatcgatttgcagtaactcgagatttgaccctgaaacctggatatgtgctacagttcaagctaaacataggttgtgccaatcaattcagcagtactgctccagttcttcttcagtactctcatgatgctggtatgtcctggtttctggtgaaagaaggctgttacccggcttctgcaggcaaaggatgcgaaggaaactccagagaactaagtgagcccaccatgtatcacacaggggactttgaagaatggacaagaatcaccattgttattccaaggtctcttgcatccagcaagaccagattccgatggatccaggagagcagctcacagaaaaacgtgcctccatttggtttagatggagtgtacatatccgagccttgtcccagttactgcagtggccatggggactgcatttcaggagtgtgtttctgtgacctgggatatactgctgcacaaggaacctgtgtgtcaaatgtccccaatcacaatgagatgttcgataggtttgaggggaagctcagccctctgtggtacaagataacaggtgcccaggttggaactggctgtggaacacttaacgatggcaaatctctctacttcaatggccctgggaaaagggaagcccggacggtccctctggacaccaggaatatcagacttgttcaattttatatacaaattggaagcaaaacttcaggcattacctgcatcaaaccaagaactagaaatgaagggcttattgttcagtattcaaatgacaatgggatactctggcatttgcttcgagagttggacttcatgtccttcctggaaccacagatcatttccattgacctgccacaggacgcgaagacacctgcaacggcatttcgatggtggcaaccgcaacatgggaagcattcagcccagtgggctttggatgatgttcttataggaatgaatgacagctctcaaactggatttcaagacaaatttgatggctctatagatttgcaagccaactggtatcgaatccaaggaggtcaagttgatattgactgtctctctatggatactgctctgatattcactgaaaacataggaaaacctcgttatgctgagacctgggattttcatgtgtcagcatctacctttttgcagtttgaaatgagcatgggctgtagcaagcccttcagcaactcccacagtgtacagctccagtattctctgaacaatggcaaggactggcatcttgtcaccgaagagtgtgttcctccaaccattggctgtctgcattacacggaaagttcaatttacacctcggaaagattccagaattggaagcggatcactgtctaccttccactctccaccatttctcccaggacccggttcagatggattcaggccaactacactgtgggggctgattcctgggcgattgataatgttgtactggcctcagggtgcccttggatgtgctcaggacgagggatttgtgatgctggacgctgtgtgtgtgaccggggctttggtggaccctattgtgttcctgttgttcctctgccctcgattcttaaagacgatttcaatgggaatttacatcctgacctttggcctgaagtgtatggtgcagagagggggaatctgaatggtgaaaccatcaaatctggaacatctctaatttttaaaggggaaggactaaggatgcttatttcaagagatctagattgtacaaatacaatgtatgtccagttttcacttagatttatagcaaaaagtaccccagagagatctcactctattctgttacaattctccatcagtggaggaatcacttggcacctgatggatgaattttactttcctcaaacaacgaatatacttttcatcaatgttcccttgccatacactgcccaaaccaatgctacaagattcagactctggcaaccttataataacggtaagaaagaagaaatctggattgttgatgacttcattatcgatggaaataatgtaaacaaccctgtgatgctcttggatacatttgattttgggcccagagaagacaattggtttttctatcctggtggtaacatcggtctttattgtccatattcttcaaagggggcacctgaagaagattcagctatggtgtttgtttcaaatgaagttggtgagcattccattaccacccgtgacctaaatgtgaatgagaacaccatcatacaatttgagatcaacgttggctgttcgactgatagctcatccgcggatccagtgagactggaattttcaagggacttcggggcgacctggcaccttctgctgcccctctgctaccacagcagcagccacgtcagctctttatgctccaccgagcaccaccccagcagcacctactacgcaggaaccatgcagggctggaggagggaggtcgtgcactttgggaagctgcacctttgtggatctgtccgtttcagatggtaccagggattttaccctgccggctctcagccagtgacatgggccattgataatgtctacatcggtccccagtgtgaggagatgtgtaatggacaggggagctgtatcaatggaaccaaatgtatatgtgaccctggctactcaggtccaacctgtaaaataagcaccaaaaatcctgattttctcaaagatgatttcgaaggtcagctagaatctgatagattcttattaatgagtggtgggaaaccatctcgaaagtgtggaatcctttctagtggaaacaacctctttttcaatgaagatggcttgcgcatgttgatgacacgagacctggatttatcacatgctagatttgtgcagttcttcatgagactgggatgtggtaaaggcgttcctgaccccaggagtcaacccgtgctcctacagtattctctcaacggtggcctctcgtggagtcttcttcaggagttccttttcagcaattccagcaatgtgggcaggtacattgccctggagatacccttgaaagcccgttctggttctactcgccttcgctggtggcaaccgtctgagaatgggcacttctacagcccctgggttatcgatcagattcttattggaggaaatatttctggtaatacggtcttggaagatgatttcacaacccttgatagtaggaaatggctgcttcacccaggaggcaccaagatgcccgtgtgtggctctactggtgatgccctggtcttcattgaaaaggccagcacccgttacgtggtcagcacagacgttgccgtgaatgaggattccttcctacagatagacttcgctgcctcctgctcagtcacagactcttgttatgcgattgaattggaatactcagtagatcttggattgtcatggcacccattggtaagggactgtctgcctaccaatgtggaatgcagtcgctatcatctgcaacggatcctggtgtcagacactttcaacaagtggactagaatcactctgcctctccctccttataccaggtcccaagccactcgtttccgttggcatcaaccagctccttttgacaagcagcagacatgggcaatagataatgtctatatcggggatggctgcatagacatgtgcagtggccatgggagatgcatccagggaaactgcgtctgtgatgaacagtggggtggcctgtactgtgatgaccccgagacctctcttccaacccaactcaaagacaacttcaatcgagctccatccagtcagaactggctgactgtgaacggagggaaattgagtacagtgtgtggagccgtggcgtcgggaatggctctccatttcagtgggggttgtagtcgattattagtcactgtggatctaaacctcactaatgctgagttcatccaattttacttcatgtatgggtgcctgattacaccaaacaaccgtaaccaaggtgttctcttggaatattctgtcaatggaggcattacctggaacctgctcatggagattttctatgaccagtacagtaagcccggatttgtgaatatccttctccctcctgatgctaaagagattgccactcgcttccgctggtggcagccaagacatgacggcctggatcagaacgactgggccattgacaatgtcctcatctcaggctctgctgaccaaaggaccgttatgctggacaccttcagcagcgccccagtaccccagcacgagcgctcccctgcagatgccggccctgtcgggaggatcgcctttgacatgtttatggaagacaaaacttcagtgaatgagcactggctattccatgatgattgtacagtagaaagattctgtgactcccctgatggtgtgatgctctgtggcagtcatgatggacgggaggtgtatgcagtgacccatgacctgactcccactgaaggctggattatgcaattcaagatctcagttggatgtaaggtgtctgaaaaaattgcccagaatcaaattcatgtgcagtattctactgacttcggtgtgagttggaattatctggtccctcagtgcttgcctgctgacccaaaatgctctggaagtgtttctcagccatctgtattctttccaactaaagggtggaaaaggatcacctacccacttcctgaaagcttagtgggaaatccggtaaggtttaggttctatcagaagtactcagacatgcagtgggcaatcgataatttctacctgggccctggatgcttggacaactgcaggggccatggagattgcttaagggaacagtgcatctgtgatccgggatactcagggccaaactgctacttgacccacactctgaagactttcctgaaggaacgctttgacagtgaagaaatcaaacctgacttatggatgtccttagaaggtggaagtacttgcactgagtgtggaattcttgccgaggacactgcactctattttgggggatccactgtgagacaagcggttacacaagatttggatcttcgaggtgcaaagttcctgcaatactgggggcgcatcggtagtgagaacaacatgacctcttgccatcgtcccatctgccggaaggaaggcgtgctgttggactactctaccgatggaggaattacctggactttgctccatgagatggattaccagaaatacatttctgttagacacgactacatacttcttcctgaagatgccctcaccaacacaactcgacttcgctggtggcagccttttgtgatcagcaatggaattgtggtctctggggtggagcgtgctcagtgggcactggacaacattttgattggtggagcagaaatcaatcccagccaattggtggacacttttgatgatgaaggcacttcccatgaagaaaactggagtttttaccctaatgctgtaaggacagcaggattttgtggcaatccatcctttcacctctattggccaaataaaaagaaggacaagactcacaatgctctctcctcccgagaactcattatacagccaggatacatgatgcagtttaaaattgtggtgggttgtgaagccacttcttgtggtgaccttcattccgtaatgctggaatacactaaggatgcaagatcggattcctggcagctcgtacagacccagtgccttccttcctcttctaacagcattggctgctcccctttccagttccatgaagccaccatctacaactctgtcaacagctcaagctggaaaagaatcaccatccagctgcctgaccatgtctcctctagtgcaacacagttccgctggatccagaagggagaagaaactgagaagcaaagctgggcaattgaccacgtgtacattggagaggcttgccccaagctctgcagcgggcacggatactgcacgaccggtgccatctgcatctgcgacgagagcttccaaggtgatgactgctctgttttcagtcacgaccttcccagttatattaaagataattttgagtccgcaagagtcaccgaggcaaactgggagaccattcaaggtggagtcataggaagtggctgtgggcagctggccccctacgcccatggagactcactgtactttaatggctgtcagatcaggcaagcagctaccaagcctctggatctcactcgagcaagcaaaatcatgtttgttttgcaaattgggagcatgtcgcagacggacagctgcaacagtgacctgagtggcccccacgctgtggacaaggcggtgctgctgcaatacagcgtcaacaacgggatcacctggcatgtcatcgcccagcaccagccaaaggacttcacacaagctcagagagtgtcttacaatgtccccctggaggcacggatgaaaggagtcttactgcgctggtggcaaccacgccacaatggaacaggtcatgatcaatgggctttggaccatgtggaggtcgtcctagtaagcactcgcaaacaaaattacatgatgaatttttcacgacaacatgggctcagacatttctacaacagaagacgaaggtcacttaggcgatacccatgaagaatcaaaaagtttattttttttcttccaacatgtgatgtgttgctctccattcttttaaatctcgcactacatctgatatcaggaaatatctgtgaaggacttggtgattacctgaaagcccttctcaagaccgagtgtacaccactttcccacactgtgaactaatgacaagtgacttatttgctcataagtaaatgtcttcatgttgatgtgtccgtgaaagttgtgatctgttgtaatatcagttacagtggcagtattgacaataagaaacagtttaacagaaaaatgaaatttaagcacaaaaaatttaagagattttatgtttaaaatggcatttagcacagtatttaacattcttggtcacaaagctatttaagtggactgtatttcagctatgtctcatgttttatatgattaaattatcattgtttgtcctttatgtattctcttctacaatacaacacattgaaactgtatttacttgttatgttgtaatattttgctgctgaatttggggctacttatattctgcagaaaattaattgaaatacctattcaagaagatagttgtaaagatattgtatctcctttaatatactccttaaaaatgtatgttggtttagcgttgttttgtggataagaaaaatgcttgaccctgaaatattttctactttaaattgtggatgaagaccctatctcccacaaataagttcccatttccttgtctaaagatctttttttaagtgttctgtggctgatttactaacagtaactgccattttttgtctgtgataacagagtgatttgtaaaacagtggttgttttttcattgtgttttcttcgtggattgttttttctgcgggtcatattcataccttctgatgaagttgtacaacaccagcaacattataatggccctgtagctctgaatgctatttgtgtaactgaaaggttgcactctagggtgaaccaagctataaaagcccatgcttaaataaaaattatgtccaaaagcc

SEQ ID NO: 46 - protein, 3460 aa, Homo Sapiens [sequence omitted]

SEQ ID NO: 47 - DNA, 1742 bp, Homo Sapiens
  CDS (163)...(1530)
cacagctctctttcccaaggagtaatcagagggtgagaacgtggagcctggtggacaggtgaaagcactgggatctttctgcccagaaaggggaaagttgcacatttatatcctagagggaagcgacagcagtgcttctccctgtgctgaggtacaggagccatgtggctagaaatcctcctcacttcagtgctgggctttgccatctactggttcatctcccgggacaaagaggaaactttgccacttgaagatgggtggtgggggccaggcacgaggtccgcagccagggaggacgacagcatccgccctttcaaggtggaaacgtcagatgaggagatccacgacttacaccagaggatcgataagttccgtttcaccccacctttggaggacagctgcttccactatggcttcaactccaactacctgaagaaagtcatctcctactggcggaatgaatttgactggaagaagcaggtggagattctcaacagataccctcacttcaagactaagattgaagggctggacatccacttcatccacgtgaagcccccccagctgcccgcaggccataccccgaagcccttgctgatggtgcacggctggcccggctctttctacgagttttataagatcatcccactcctgactgaccccaagaaccatggcctgagcgatgagcacgtttttgaagtcatctgcccttccatccctggctatggcttctcagaggcatcctccaagaaggggttcaactcggtggccaccgccaggatcttttacaagctgatgctgcggctgggcttccaggaattctacattcaaggaggggactgggggtccctgatctgcactaatatggcccagctggtgcccagccacgtgaaaggcctgcacttgaacatggctttggttttaagcaacttctctaccctgaccctcctcctgggacagcgtttcgggaggtttcttggcctcactgagagggatgtggagctgctgtaccccgtcaaggagaaggtattctacagcctgatgagggagagcggctacatgcacatccagtgcaccaagcctgacaccgtaggctctgctctgaatgactctcctgtgggtctggctgcctatattctagagaagttttccacctggaccaatacggaattccgatacctggaggatggaggcctggaaaggaagttctccctggacgacctgctgaccaacgtcatgctctactggacaacaggcaccatcatctcctcccagcgcttctacaaggagaacctgggacagggctggatgacccagaagcatgagcggatgaaggtctatgtgcccactggcttctctgccttcccttttgagctattgcacacgcctgaaaagtgggtgaggttcaagtacccaaagctcatctcctattcctacatggttcgtgggggccactttgcggcctttgaggagccggagctgctcgcccaggacatccgcaagttcctgtcggtgctggagcggcaatgacccacccctctccccccgcctgccacctccccccacaagtgccctccaggcttttcttggggaagataccccttttctgaggaatgagtttgcctccgtcccctgcccatgctgggagcccacgctcaccccctcacccctccaagctcactccccaacccccaactccgtgtggtaagcaacatggctttgatgataaacgactttactct

SEQ ID NO: 48 - protein, 455 aa, Homo Sapiens
MWLEILLTSVLGFAIYWFISRDKEETLPLEDGWWGPGTRSAAREDDSIRPFKVETSDEEIHDLHQRIDKFRFTPPLEDSCFHYGFNSNYLKKVISYWRNEFDWKKQVEILNRYPHFKTKIEGLDIHFIHVKPPQLPAGHTPKPLLMVHGWPGSFYEFYKIIPLLTDPKNHGLSDEHVFEVICPSIPGYGFSEASSKKGFNSVATARIFYKLMLRLGFQEFYIQGGDWGSLICTNMAQLVPSHVKGLHLNMALVLSNFSTLTLLLGQRFGRFLGLTERDVELLYPVKEKVFYSLMRESGYMHIQCTKPDTVGSALNDSPVGLAAYILEKFSTWTNTEFRYLEDGGLERKFSLDDLLTNVMLYWTTGTIISSQRFYKENLGQGWMTQKHERMKVYVPTGFSAFPFELLHTPEKWVRFKYPKLISYSYMVRGGHFAAFEEPELLAQDIRKFLSVLERQ

SEQ ID NO: 49 - DNA, 1805 bp, Homo Sapiens
  CDS (249)...(1253)
aagagactgaactgtatctgcctctatttccaaaagactcacgttcaactttcgctcacacaaagccgggaaaattttattagtcctttttttaaaaaaagttaatataaaattatagcaaaaaaaaaaaggaacctgaactttagtaacacagctggaacaatcgcagcggcggcggcagcggcgggagaagaggtttaatttagttgattttctgtggttgttggttgttcgctagtctcacggtgatggaagctgcacattttttcgaagggaccgagaagctgctggaggtttggttctcccggcagcagcccgacgcaaaccaaggatctggggatcttcgcactatcccaagatctgagtgggacatacttttgaaggatgtgcaatgttcaatcataagtgtgacaaaaactgacaagcaggaagcttatgtactcagtgagagtagcatgtttgtctccaagagacgtttcattttgaagacatgtggtaccaccctcttgctgaaagcactggttcccctgttgaagcttgctagggattacagtgggtttgactcaattcaaagcttcttttattctcgtaagaatttcatgaagccttctcaccaagggtacccacaccggaatttccaggaagaaatagagtttcttaatgcaattttcccaaatggagcaggatattgtatgggacgtatgaattctgactgttggtacttatatactctggatttcccagagagtcgggtaatcagtcagccagatcaaaccttggaaattctgatgagtgagcttgacccagcagttatggaccagttctacatgaaagatggtgttactgcaaaggatgtcactcgtgagagtggaattcgtgacctgataccaggttctgtcattgatgccacaatgttcaatccttgtgggtattcgatgaatggaatgaaatcggatggaacttattggactattcacatcactccagaaccagaattttcttatgttagctttgaaacaaacttaagtcagacctcctatgatgacctgatcaggaaagttgtagaagtcttcaagccaggaaaatttgtgaccaccttgtttgttaatcagagttctaaatgtcgcacagtgcttgcttcgccccagaagattgaaggttttaagcgtcttgattgccagagtgctatgttcaatgattacaattttgtttttaccagttttgctaagaagcagcaacaacagcagagttgattaagaaaaatgaagaaaaaacgcaaaaagagaacacatgtagaaggtggtggatgctttctagatgtcgatgctgggggcagtgctttccataaccaccactgtgtagttgcagaaagccctagatgtaatgatagtgtaatcattttgaattgtatgcattattatatcaaggagttagatatcttgcatgaatgctctcttctgtgtttaggtattctctgccactcttgctgtgaaattgaagtggatgtagaaaaaaccttttactatatgaaactttacaacacttgtgaaagcaactcaatttggtttatgcacagtgtaatatttctccaagtatcatccaaaattccccacagacaaggctttcgtcctcattaggtgttggcctcagcctaaccctctaggactgttctattaaattgctgccagaattttacatccagttacctccactttctagaacatattctttactaatgttattgaaaccaatttctacttcatactgatgtttttggaaacagcaattaaagtttttcttccatg

SEQ ID NO: 50 - protein, 334 aa, Homo Sapiens
MEAAHFFEGTEKLLEVWFSRQQPDANQGSGDLRTIPRSEWDILLKDVQCSIISVTKTDKQEAYVLSESSMFVSKRRFILKTCGTTLLLKALVPLLKLARDYSGFDSIQSFFYSRKNFMKPSHQGYPHRNFQEEIEFLNAIFPNGAGYCMGRMNSDCWYLYTLDFPESRVISQPDQTLEILMSELDPAVMDQFYMKDGVTAKDVTRESGIRDLIPGSVIDATMFNPCGYSMNGMKSDGTYWTIHITPEPEFSYVSFETNLSQTSYDDLIRKVVEVFKPGKFVTTLFVNQSSKCRTVLASPQKIEGFKRLDCQSAMFNDYNFVFTSFAKKQQQQQS

SEQ ID NO: 51 - DNA, 3707 bp, Homo Sapiens
  CDS (231)...(3299)
gtgtgtccctccagtgccgcttgccccttgttctcccaagcaccagggggacccctgtcttagattcaagttgcatcactagactaacagctctgggaacagaggacactgaggactagtttgggaaatgaaaaacatctgcaatgagaggtaattttattctcctcttccttttaccctagtctcactctccatagtaggacctggatctttgcatcagagaaaacataatgaacaataactggaatgtgtgtttctttcttttctgccctagtattactagaacatttgcatcgggaaaaacagaaaaggtgatctttcaagcactcaaggagttaggtcttcccagtggaaagaatgatgaaattgagcccacagcattttcttatgaaaagttctatgaactgacacaaaagatttgtcctcggacagatatagaagatcttttcaaaaaaatcaatggagacaaaactgattatttaacggtagaccaattagtgagctttctaaatgaacatcaacgagatcctcgattgaatgaaattttatttccattttatgatgccaaaagggcaatgcagatcattgagatgtatgaacctgatgaagatttgaagaaaaaaggccttatatcaagtgatgggttttgcagatatctgatgtcagatgaaaacgccccagtcttcctagatcgtttagaactttaccaagaaatggaccatcctctggctcactacttcatcagttcttcccataacacttatctcactggcagacagttcggcgggaagtcttcggtagaaatgtacagacaggttctcctggctggttgcagatgtgttgaacttgactgctgggatggaaaaggtgaggaccaagaaccaataataactcatggaaaagcaatgtgtacagatatcctttttaaggatgtaattcaagccatcaaggaaactgcatttgtcacatcagaatatcctgtaattctctcctttgaaaatcactgcagcaaatatcaacagtacaagatgtccaaatattgcgaagatctatttggggatctcctgttgaaacaagcacttgaatcacatccactggaaccaggcagacctttgccatcccccaatgacctcaaaagaaaaatactcataaaaaacaagcggctgaaacctgaagttgaaaaaaaacagctggaagctttgagaagcatgatggaagctggagaatctgcctccccagcaaacatcttagaggacgataatgaagaggagatcgaaagtgctgaccaagaggaggaagctcaccccgaattcaaatttggaaatgaactttctgctgatgacttgggtcacaaggaagctgttgcaaatagcgtcaagaagggcctggtcactgtagaagatgagcaggcgtggatggcatcttataaatatgtaggtgctaccactaatatccatccatatttgtccacaatgatcaactatgcccagcctgtaaagtttcaaggtttccatgtggcagaagaacgcaatattcattataacatgtcttcttttaatgaatcagtcggtcttggctacttgaagacacatgcaattgaatttgtcaattataacaaacggcaaatgagtcgcatttaccccaagggaggccgagtcgattccagtaattacatgcctcagattttctggaacgctggctgccagatggtttcactgaactatcaaaccccagatttagcgatgcaattgaatcagggaaaatttgagtataatggatcgtgcgggtaccttctcaaaccagatttcatgaggcggcctgatcgaacatttgaccccttctctgaaacgcctgttgatggggttattgcagccacttgctcagtgcaggttatatcaggtcaattcttatcagataagaaaattggcacctacgtagaggtggatatgtatgggttgcccactgacaccatacgtaaggaattccgaactcgcatggttatgaataatggactcaatccagtttacaatgaagagtcacttgtatttcggaaggtgatcctgccggacctggctgtcttgagaatagctgtgtatgatgataacaacaagctgattggccagaggattcctccgcttgatggcctccaagccggatatcgacacatttcccttcgaaatgagggaaataaaccattatcactaccaacaattttctgcaatattgttcttaaaacatatgtgcctgatggatttggagatatcgtggatgctttatcagatccaaagacatttctctcaattacagaaaagagagcagaccaaatgagagctatgggcattgagactagtgacatagccgacgtgcccagtgacacttccaaaaatgacaagaaaggaaaggccaacaccgccaaagcaaatgtgacccctcagagtagctctgagctcagaccaaccaccacggctgccctgccgtctggtgtggaagccaagaaaggtattgaacttatccctcaagtaaggatagaagacttaaagcagatgaaggcttacttgaagcatttaaagaaacagcagaaggagctaaattctttaaagaagaaacatgcaaaggaacacagtaccatgcagaagttacactgcacgcaagttgacaaaattgtggcacagtatgacaaagagaagtcgactcatgagaaaatcctagagaaggcaatgaagaagaaagggggaagtaattgtcttgaaatgaagaaagaaacagaaattaaaattcagacgctgacatcagatcacaaatctaaggtcaaggagattgtagcacagcacacaaaggaatggtcagaaatgatcaatactcacagtgctgaggagcaagaaatccgagacctgcacctcagccagcagtgtgagctgctgaaaaagctactcatcaatgcccacgagcagcaaacccagcagctgaaactgtcccatgacagggaaagcaaggaaatgcgagcacaccaggctaagatttctatggaaaatagcaaagccatcagccaagataaatctatcaagaataaagcagaacgggaaaggcgagtcagggagttaaacagcagcaacactaaaaagtttctggaagaaagaaagagacttgccatgaagcagtccaaagaaatggatcagttgaaaaaagtccagcttgaacatctagaattcctagagaaacagaatgagcaggcgaaggagatgcagcagatggtgaaattggaagccgagatggaccgcagaccagcaacagtagtatgaaactccaaaatgcaaactgaagcagcaaacccacaaagcatcaaaagactcactcacaaaacttctgaacacaaactccatggatgaaagctgtttattttgtttcctttatgtgtaaacaagatgatatctgaaaccagagagacttggaatgtctgactgacttctatttaacagcttgagtattgcatttccttggccaaacaaaaatagctacaaatccacaaaaatttactattccagtaaggcagagtccaaccattgataatacaacttaaacatgtttgctataaaataccatcacaagtaaatgagcttggtgtgaacaactcttcctttgtgatgccttaggacatgttgtaactgcaggcaaaacaaacaaaacagtgcattagcaatttcatagca

SEQ ID NO: 52 - protein, 1022 aa, Homo Sapiens [sequence omitted]

SEQ ID NO: 53 - DNA, 1443 bp, Homo Sapiens
  CDS (127)...(1383)
ggcaggtgcaggcgccgcggggccggatcctccgcgcggccgagtccatctcctgggaaatggggcggacagtgtttccttgactgactattgtgagcgccctctctctccggcggagcggagaccatggcccccactcagggcccccgggccccgctggaattcggagggcccctgggcgccgcggctctgctactgctgctgcccgccaccatgttccacctgctcctggcggcccgttcgggccccgcgcgcctgctgggtccacccgcgtccctgcccgggctggaggtgctgtggagcccacgggcgctgctgctgtggctcgcctggctcggcctgcaggcggcgctctacctactgccggcgcgcaaggtggccgaagggcaggaattgaaggacaagagtcgcctgcgctatcctattaacggcttccaggccctggtgctgacagccctgttggtggggctggggatgtcagcggggctgcctctgggggcgctcccggaaatgctcctgcccttggcgtttgtcgccaccctcaccgctttcatcttcagcctctttctctacatgaaggcgcaggtagccccagtttcggccctggcacctggggggaactcaggcaatccgatttacgacttttttctgggacgagagctcaaccctcgtatctgtttcttcgacttcaaatatttctgtgaactgcgacccggcctcatcggctgggtcctcatcaacctggccctgttgatgaaggaggcagagcttcgaggcagtccctcactggccatgtggctggtcaatggcttccagttgctctacgtgggtgatgccctctggcacgaggaggccgtcctcaccaccatggatatcacacatgacgggtttggcttcatgctggcgtttggggacatggcctgggtgcccttcacctacagcctgcaggcccagttcctgctgcaccacccgcagcccctggggttgcccatggcctctgtcatctgcctcatcaatgctattggttactacatcttccgtggggcgaattcccagaaaaacactttccgaaagaatccttctgaccccagagtggctgggcttgagaccatctctacagccacagggcggaaactgctggtgtctgggtggtggggtatggtccgccatcccaactatcttggagacctcatcatggctctggcttggtccttgccctgcggggtgtcacacctgctgccctacttctacctcctctacttcaccgcgctgctggtgcaccgtgaggcccgggatgagcggcagtgcctgcagaagtacggcctggcctggcaggagtactgccggcgtgtgccttaccgcatcatgccctacatctactgaggatgaacaacctcagagaagaggtggtttagagcaaggaaaaaaatgaaaccagtgacc

SEQ ID NO: 54 - protein, 418 aa, Homo Sapiens [sequence omitted]

SEQ ID NO: 55 - DNA, 2853 bp, Homo Sapiens
  CDS (1)...(2853)
atgcttctgctgggcatcctaaccctggctttcgccgggcgaaccgctggaggctctgagccagagcgggaggtagtcgttcccatccgactggacccggacattaacggccgccgctactactggcggggtcccgaggactccggggatcagggactcatttttcagatcacagcatttcaggaggacttttacctacacctgacgccggatgctcagttcttggctcccgccttctccactgagcatctgggcgtccccctccaggggctcaccgggggctcttcagacctgcgacgctgcttctattctggggacgtgaacgccgagccggactcgttcgctgctgtgagcctgtgcggggggctccgcggagcctttggctaccgaggcgccgagtatgtcattagcccgctgcccaatgctagcgcgccggcggcgcagcgcaacagccagggcgcacaccttctccagcgccggggtgttccgggcgggccttccggagaccccacctctcgctgcggggtggcctcgggctggaaccccgccatcctacgggccctggacccttacaagccgcggcgggcgggcttcggggagagtcgtagccggcgcaggtctgggcgcgccaagcgtttcgtgtctatcccgcggtacgtggagacgctggtggtcgcggacgagtcaatggtcaagttccacggcgcggacctggaacattatctgctgacgctgctggcaacggcggcgcgactctaccgccatcccagcatcctcaaccccatcaacatcgttgtggtcaaggtgctgcttcttagagatcgtgactccgggcccaaggtcaccggcaatgcggccctgacgctgcgcaacttctgtgcctggcagaagaagctgaacaaagtgagtgacaagcaccccgagtactgggacactgccatcctcttcaccaggcaggacctgtgtggagccaccacctgtgacaccctgggcatggctgatgtgggtaccatgtgtgaccccaagagaagctgctctgtcattgaggacgatgggcttccatcagccttcaccactgcccacgagctgggccacgtgttcaacatgccccatgacaatgtgaaagtctgtgaggaggtgtttgggaagctccgagccaaccacatgatgtccccgaccctcatccagatcgaccgtgccaacccctggtcagcctgcagtgctgccatcatcaccgacttcctggacagcgggcacggtgactgcctcctggaccaacccagcaagcccatctccctgcccgaggatctgccgggcgccagctacaccctgagccagcagtgcgagctggcttttggcgtgggctccaagccctgtccttacatgcagtactgcaccaagctgtggtgcaccgggaaggccaagggacagatggtgtgccagacccgccacttcccctgggccgatggcaccagctgtggcgagggcaagctctgcctcaaaggggcctgcgtggagagacacaacctcaacaagcacagggtggatggttcctgggccaaatgggatccctatggcccctgctcgcgcacatgtggtgggggcgtgcagctggccaggaggcagtgcaccaaccccacccctgccaacgggggcaagtactgcgagggagtgagggtgaaataccgatcctgcaatctggagccctgccccagctcagcctccggaaagagcttccgggaggagcagtgtgaggctttcaacggctacaaccacagcaccaaccggctcactctcgccgtggcatgggtgcccaagtactccggcgtgtctccccgggacaagtgcaagctcatctgccgagccaatggcactggctacttctatgtgctggcacccaaggtggtggacggcacgctgtgctctcctgactccacctccgtctgtgtccaaggcaagtgcatcaaggctggctgtgatgggaacctgggctccaagaagagattcgacaagtgtggggtgtgtgggggagacaataagagctgcaagaaggtgactggactcttcaccaagcccatgcatggctacaatttcgtggtggccatccccgcaggcgcctcaagcatcgacatccgccagcgcggttacaaagggctgatcggggatgacaactacctggctctgaagaacagccaaggcaagtacctgctcaacgggcatttcgtggtgtcggcggtggagcgggacctggtggtgaagggcagtctgctgcggtacagcggcacgggcacagcggtggagagcctgcaggcttcccggcccatcctggagccgctgaccgtggaggtcctctccgtggggaagatgacaccgccccgggtccgctactccttctatctgcccaaagagcctcgggaggacaagtcctctcatcccaaggacccccggggaccctctgtcttgcacaacagcgtcctcagcctctccaaccaggtggagcagccggacgacaggccccctgcacgctgggtggctggcagctgggggccgtgctccgcgagctgcggcagtggcctgcagaagcgggcggtggactgccggggctccgccgggcagcgcacggtccctgcctgtgatgcagcccatcggcccgtggagacacaagcctgcggggagccctgccccacctgggagctcagcgcctggtcaccctgctccaagagctgcggccggggatttcagaggcgctcactcaagtgtgtgggccacggaggccggctgctggcccgggaccagtgcaacttgcaccgcaagccccaggagctggacttctgcgtcctgaggccgtgctga

SEQ ID NO: 56 - protein, 950 aa, Homo Sapiens
MLLLGILTLAFAGRTAGGSEPEREVVVPIRLDPDINGRRYYWRGPEDSGDQGLIFQITAFQEDFYLHLTPDAQFLAPAFSTEHLGVPLQGLTGGSSDLRRCFYSGDVNAEPDSFAAVSLCGGLRGAFGYRGAEYVISPLPNASAPAAQRNSQGAHLLQRRGVPGGPSGDPTSRCGVASGWNPAILRALDPYKPRRAGFGESRSRRRSGRAKRFVSIPRYVETLVVADESMVKFHGADLEHYLLTLLATAARLYRHPSILNPINIVVVKVLLLRDRDSGPKVTGNAALTLRNFCAWQKKLNKVSDKHPEYWDTAILFTRQDLCGATTCDTLGMADVGTMCDPKRSCSVIEDDGLPSAFTTAHELGHVFNMPHDNVKVCEEVFGKLRANHMMSPTLIQIDRANPWSACSAAIITDFLDSGHGDCLLDQPSKPISLPEDLPGASYTLSQQCELAFGVGSKPCPYMQYCTKLWCTGKAKGQMVCQTRHFPWADGTSCGEGKLCLKGACVERHNLNKHRVDGSWAKWDPYGPCSRTCGGGVQLARRQCTNPTPANGGKYCEGVRVKYRSCNLEPCPSSASGKSFREEQCEAFNGYNHSTNRLTLAVAWVPKYSGVSPRDKCKLICRANGTGYFYVLAPKVVDGTLCSPDSTSVCVQGKCIKAGCDGNLGSKKRFDKCGVCGGDNKSCKKVTGLFTKPMHGYNFVVAIPAGASSIDIRQRGYKGLIGDDNYLALKNSQGKYLLNGHFVVSAVERDLVVKGSLLRYSGTGTAVESLQASRPILEPLTVEVLSVGKMTPPRVRYSFYLPKEPREDKSSHPKDPRGPSVLHNSVLSLSNQVEQPDDRPPARWVAGSWGPCSASCGSGLQKRAVDCRGSAGQRTVPACDAAHRPVETQACGEPCPTWELSAWSPCSKSCGRGFQRRSLKCVGHGGRLLARDQCNLHRKPQELDFCVLRPC

SEQ ID NO: 57 - DNA, 2481 bp, Homo Sapiens
  CDS (110)...(1906)
cgaacttggggggagtgcacagaagaacttcgggagcgcacgcgggaccagggaccaggctgagactcggggcgccagtccgggcaggggcagcgggagccggccggagatgccctgtatccaagcccaatatgggacaccagcaccgagtccgggaccccgtgaccacctggcaagcgaccccctgacccctgagttcatcaagcccaccatggacctggccagccccgaggcagcccccgctgcccccactgccctgcccagcttcagcaccttcatggacggctacacaggagagtttgacaccttcctctaccagctgccaggaacagtccagccatgctcctcagcctcctcctcggcctcctccacatcctcgtcctcagccacctcccctgcctctgcttccttcaagttcgaggacttccaggtgtacggctgctaccccggccccctgagcggcccagtggatgaggccctgtcctccagtggctctgactactatggcagcccctgctcggccccgtcgccctccacgcccagcttccagccgccccagctctctccctgggatggctccttcggccacttctcgcccagccagacttacgaaggcctgcgggcatggacagagcagctgcccaaagcctctgggcccccacagcctccagccttcttttccttcagtcctcccaccggccccagccccagcctggcccagagccccctgaagttgttcccctcacaggccacccaccagctgggggagggagagagctattccatgcctacggccttcccaggtttggcacccacttctccacaccttgagggctcggggatactggatacacccgtgacctcaaccaaggcccggagcggggccccaggtggaagtgaaggccgctgtgctgtgtgtggggacaacgcttcatgccagcattatggtgtccgcacatgtgagggctgcaagggcttcttcaagcgcacagtgcagaaaaacgccaagtacatctgcctggctaacaaggactgccctgtggacaagaggcggcgaaaccgctgccagttctgccgcttccagaagtgcctggcggtgggcatggtgaaggaagttgtccgaacagacagcctgaaggggcggcggggccggctaccttcaaaacccaagcagcccccagatgcctcccctgccaatctcctcacttccctggtccgtgcacacctggactcagggcccagcactgccaaactggactactccaagttccaggagctggtgctgccccactttgggaaggaagatgctggggatgtacagcagttctacgacctgctctccggttctctggaggtcatccgcaagtgggcggagaagatccctggctttgctgagctgtcaccggctgaccaggacctgttgctggagtcggccttcctggagctcttcatcctccgcctggcgtacaggtctaagccaggcgagggcaagctcatcttctgctcaggcctggtgctacaccggctgcagtgtgcccgtggcttcggggactggattgacagtatcctggccttctcaaggtccctgcacagcttgcttgtcgatgtccctgccttcgcctgcctctctgcccttgtcctcatcaccgaccggcatgggctgcaggagccgcggcgggtggaggagctgcagaaccgcatcgccagctgcctgaaggagcacgtggcagctgtggcgggcgagccccagccagccagctgcctgtcacgtctgttgggcaaactgcccgagctgcggaccctgtgcacccagggcctgcagcgcatcttctacctcaagctggaggacttggtgccccctccacccatcattgacaagatcttcatggacacgctgcccttctgacccctgcctgcctgggaacacgtgtgcacatgcgcactctctcatatgccaccccatgtgcctttagtccacggaccccagagcacccccaagcctgggcttagctgcagaacagagggacctgctcacctgcccaaaggggatgaagggagggaggctcaaggcccttgggggagggggatgccttcatgggggtgacccacgatgtgttcttatcccccccgcctggccaccggcctttatgttttttgtaagataaaccgtttttaacacatagcgccgtgctgtaaataagcccagtactgctgtaaatacaggaagaaagagcttgaggtgggagcgggctgggaggaagggatgggccccggccttcctgggcagcctttccagcctcctgctgggctctctcttcctaccctccttccacatgtacatgtacataaactgtcactctaggaagaagacaaatgacagattctgaccatttatatttgtgtattttccaggatttatagtatgtgacttttctgattaatatatttaatatattgaataaaaaatagacatgtagttgg

SEQ ID NO: 58 - protein, 598 aa, Homo Sapiens
MPCIQAQYGTPAPSPGPRDHLASDPLTPEFIKPTMDLASPEAAPAAPTALPSFSTFMDGYTGEFDTFLYQLPGTVQPCSSASSSASSTSSSSATSPASASFKFEDFQVYGCYPGPLSGPVDEALSSSGSDYYGSPCSAPSPSTPSFQPPQLSPWDGSFGHFSPSQTYEGLRAWTEQLPKASGPPQPPAFFSFSPPTGPSPSLAQSPLKLFPSQATHQLGEGESYSMPTAFPGLAPTSPHLEGSGILDTPVTSTKARSGAPGGSEGRCAVCGDNASCQHYGVRTCEGCKGFFKRTVQKNAKYICLANKDCPVDKRRRNRCQFCRFQKCLAVGMVKEVVRTDSLKGRRGRLPSKPKQPPDASPANLLTSLVRAHLDSGPSTAKLDYSKFQELVLPHFGKEDAGDVQQFYDLLSGSLEVIRKWAEKIPGFAELSPADQDLLLESAFLELFILRLAYRSKPGEGKLIFCSGLVLHRLQCARGFGDWIDSILAFSRSLHSLLVDVPAFACLSALVLITDRHGLQEPRRVEELQNRIASCLKEHVAAVAGEPQPASCLSRLLGKLPELRTLCTQGLQRIFYLKLEDLVPPPPIIDKIFMDTLPF

SEQ ID NO: 59 - DNA, 1071 bp, Homo Sapiens
  CDS (106)...(918)
tcgggccagaattcggcacgaggcggcacgagggcgacggcctcacggggctttggaggtgaaagaggcccagagtagagagagagagagaccgacgtacacgggatggctacgggaacgcgctatgccgggaaggtggtggtcgtgaccgggggcgggcgcggcatcggagctgggatcgtgcgcgccttcgtgaacagcggggcccgagtggttatctgcgacaaggatgagtctgggggccgggccctggagcaggagctccctggagctgtctttatcctctgtgatgtgactcaggaagatgatgtgaagaccctggtttctgagaccatccgccgatttggccgcctggattgtgttgtcaacaacgctggccaccacccacccccacagaggcctgaggagacctctgcccagggattccgccagctgctggagctgaacctactggggacgtacaccttgaccaagctcgccctcccctacctgcggaagagtcaagggaatgtcatcaacatctccagcctggtgggggcaatcggccaggcccaggcagttccctatgtggccaccaagggggcagtaacagccatgaccaaagctttggccctggatgaaagtccatatggtgtccgagtcaactgtatctccccaggaaacatctggaccccgctgtgggaggagctggcagccttaatgccagaccctagggccacaatccgagagggcatgctggcccagccactgggccgcatgggccagcccgctgaggtcggggctgcggcagtgttcctggcctccgaagccaacttctgcacgggcattgaactgctcgtgacggggggtgcagagctggggtacgggtgcaaggccagtcggagcacccccgtggacgcccccgatatcccttcctgatttctctcatttctacttggggcccccttcctaggactctcccaccccaaactccaacctgtatcagatgcagcccccaagcccttagactctaagcccagttagcaaggtgccgggtcaccctgcaggttcccataaaaacgatttgcagcc

SEQ ID NO: 60 - protein, 270 aa, Homo Sapiens
MATGTRYAGKVVVVTGGGRGIGAGIVRAFVNSGARVVICDKDESGGRALEQELPGAVFILCDVTQEDDVKTLVSETIRRFGRLDCVVNNAGHHPPPQRPEETSAQGFRQLLELNLLGTYTLTKLALPYLRKSQGNVINISSLVGAIGQAQAVPYVATKGAVTAMTKALALDESPYGVRVNCISPGNIWTPLWEELAALMPDPRATIREGMLAQPLGRMGQPAEVGAAAVFLASEANFCTGIELLVTGGAELGYGCKASRSTPVDAPDIPS

SEQ ID NO: 61 - DNA, 2156 bp, Homo Sapiens
  CDS (39)...(1502)
ctcagtcgtaaagaggaaaggcagaatttttccttgctatggctggaacaaacacacttttgatgctggaaaacttcatagatggaaaatttttaccttgtagctcatatatagattcttacgacccatcaacaggggaagtgtattgcagagtgccaaatagtggaaaagacgagatcgaagccgcggtcaaggccgccagagaagcctttcccagctggtcatcccgcagcccccaggagcgctcacgggtcctgaaccaggtggcggatttgctggagcagtccctggaggagtttgcccaggccgagtctaaagaccaagggaaaaccttagcactggcaagaaccatggacattccccggtctgtgcagaacttcaggttcttcgcttcctccagcctgcaccacacgtcagagtgcacgcagatggaccacctgggctgcatgcactacacggtgcgggccccggtgggagtcgctggtctgatcagcccctggaatttgccactctacttgctgacctggaagatagctccagcgatggctgcagggaacactgtgatagccaagcccagtgagctgacttcagtgactgcgtggatgttgtgcaaactcctggataaagcaggtgttccaccaggtgtggtcaatattgtgtttggaaccgggcccagggtgggtgaggccctggtgtcccacccagaggtgcccctgatctccttcaccgggagccagcccaccgctgagcggatcacccagctgagcgctccccactgcaaaaagctctccctggagctggggggcaagaatcctgccatcatctttgaggacgccaacctggatgagtgcattccggcaaccgtcaggtccagctttgccaaccagggtgaaatctgtctctgtaccagcaggatctttgtccagaagagcatctatagtgaatttttaaagagatttgtagaagctaccagaaagtggaaagtcggcattccctctgatccactggtgagcataggtgctctgataagtaaagcacatttggagaaagtcagaagttacgtcaagagagctcttgctgaaggtgcccaaatttggtgcggtgagggagtggataagttgagcctccctgccaggaaccaggcaggctactttatgcttcccacggtgataacagacattaaggatgaatcctgctgcatgacggaagagatatttggtccagtgacgtgtgtcgtcccctttgatagtgaagaggaggtgattgaaagagccaacaacgttaagtatgggctgggggctaccgtgtggtccagcaatgtggggcgcgtccaccgggtggctaagaagctgcagtctggcttggtctggaccaactgctggctcatcagggagctgaaccttcctttcggggggatgaagagttctggaataggtagagagggagccaaggactcttacgacttcttcactgagatcaaaaccatcaccgttaaacactgatctttgctaatggtggagccactatggccaatgcctggctgcaggcatcagttgttcaatgtggtagatgaaaatcatggcatgaattccagctatgccttgacttggcagaaggttatctctagcttatcctcagttcttagtaactttacccactagtgaagagatactgtctattttcaatgtggactcggaaaaaaagacttataagtaggaagatagaacaatgatgccagttgtcaggctcctcccaggttatgttttcatagtgtttctttcatcatcttcattgaactcttgggaatctccagataatcagattatttcatttggtaaattttaaaaaatatgcaatcaggcacagtgcctcatgcctataatcccagcactttgggaggccaaggtgggtggatcacttgagttcaggagttcgagatcagcctaggcaacatggtgaaatcctgtctttaccaaaagtttaaaaattagcttggtgtggtgccctctgcctatagccccagctacttgggaggctgaggtgggaggatcgcttgagcccaggcggttgaggctgcagtgagccatgatcattccactgcatttcagcctgggggatacagtgagaccttgtctttaaaaaaaaaaaaaaaaaaa

SEQ ID NO: 62 - protein, 487 aa, Homo Sapiens
MAGTNTLLMLENFIDGKFLPCSSYIDSYDPSTGEVYCRVPNSGKDEIEAAVKAAREAFPSWSSRSPQERSRVLNQVADLLEQSLEEFAQAESKDQGKTLALARTMDIPRSVQNFRFFASSSLHHTSECTQMDHLGCMHYTVRAPVGVAGLISPWNLPLYLLTWKIAPAMAAGNTVIAKPSELTSVTAWMLCKLLDKAGVPPGVVNIVFGTGPRVGEALVSHPEVPLISFTGSQPTAERITQLSAPHCKKLSLELGGKNPAIIFEDANLDECIPATVRSSFANQGEICLCTSRIFVQKSIYSEFLKRFVEATRKWKVGIPSDPLVSIGALISKAHLEKVRSYVKRALAEGAQIWCGEGVDKLSLPARNQAGYFMLPTVITDIKDESCCMTEEIFGPVTCVVPFDSEEEVIERANNVKYGLGATVWSSNVGRVHRVAKKLQSGLVWTNCWLIRELNLPFGGMKSSGIGREGAKDSYDFFTEIKTITVKH

SEQ ID NO: 63 - DNA, 1712 bp, Homo Sapiens
  CDS (168)...(1505)
tagacaattctttcagctagtttgagtgacgcactgaccagtgaagcgcagtgaagcagtgggaaccggaatatccaaagagtggtttgaaggagaaagaagcattgtggctttatatcctctgggcctgggtttcctgaagtcaccacacatagaggagagagaaaatggctgagttaaagtacatttctggatttgggaatgagtgttcttcagaggatcctcgctgcccaggttccctgccagaaggacagaataatcctcaggtctgcccctacaatctctatgctgagcagctctcaggatcggctttcacttgtccacggagcaccaataagagaagctggctgtataggattctaccttcagtttctcacaagccctttgaatccattgacgaaggccatgtcactcacaactgggatgaagttgatcctgatcctaaccagcttagatggaaaccatttgagattccaaaagcatctcagaagaaagtagactttgtgagtggcctgcataccttgtgtggagctggagacataaagtctaacaatgggcttgctatccacattttcctctgcaatacctccatggagaacagatgcttttacaattcagatggggacttcttgattgttccgcagaaagggaaccttctcatttacaccgagtttggcaagatgcttgtacagcccaatgagatctgcgtcattcagagaggaatgcggttcagcatagatgtctttgaggagaccaggggctacatcttggaggtctatggtgtccactttgagttacctgaccttggaccaattggggccaatggcttggccaatcctcgtgatttcttgatacccattgcctggtatgaggatcgccaagtaccaggtggttacacggtcattaataaataccagggcaagctgtttgctgccaaacaggatgtctccccgttcaatgttgtggcctggcacgggaattatacaccctacaagtacaacctgaagaatttcatggttatcaactcagtggcctttgaccatgcagacccatccattttcacagtattgactgctaagtctgtccgccctggagtggccattgctgattttgtcatcttcccacctcgatggggggttgctgataagaccttcaggcctccttattaccataggaactgcatgagtgagttcatgggactcatccgaggtcactatgaggcaaagcaaggtgggttcctgccagggggagggagtctacacagcacaatgaccccccatggacctgatgctgactgctttgagaaggccagcaaggtcaagctggcacctgagaggattgccgatggcaccatggcatttatgtttgaatcatctttaagtctggcggtcacaaagtggggactcaaggcctccaggtgtttggatgagaactaccacaagtgctgggagccactcaagagccacttcactcccaactccaggaacccagcagaacctaattgagactggaacattgctaccataattaagagtagatttgtgaagatttcttcagaatctcatgctttctggtagtattggaggagggggttggttaaaatgaaaattcacttttcatagtcaagtaactcagaacttttatggaaacgcatttgcaaagttctatggctgtcaccttaattactcaataaacttgctggtgttctgtgg

SEQ ID NO: 64 - protein, 445 aa, Homo Sapiens
MAELKYISGFGNECSSEDPRCPGSLPEGQNNPQVCPYNLYAEQLSGSAFTCPRSTNKRSWLYRILPSVSHKPFESIDEGHVTHNWDEVDPDPNQLRWKPFEIPKASQKKVDFVSGLHTLCGAGDIKSNNGLAIHIFLCNTSMENRCFYNSDGDFLIVPQKGNLLIYTEFGKMLVQPNEICVIQRGMRFSIDVFEETRGYILEVYGVHFELPDLGPIGANGLANPRDFLIPIAWYEDRQVPGGYTVINKYQGKLFAAKQDVSPFNVVAWHGNYTPYKYNLKNFMVINSVAFDHADPSIFTVLTAKSVRPGVAIADFVIFPPRWGVADKTFRPPYYHRNCMSEFMGLIRGHYEAKQGGFLPGGGSLHSTMTPHGPDADCFEKASKVKLAPERIADGTMAFMFESSLSLAVTKWGLKASRCLDENYHKCWEPLKSHFTPNSRNPAEPN

SEQ ID NO: 65 - DNA, 2420 bp, Homo Sapiens
  CDS (27)...(1247)
cgaccacctgtctggacaccacaaagatgccacccgttgggggcaaaaaggccaagaagggcatcctagaacgtttaaatgctggagagattgtgattggagatggagggtttgtctttgcactggagaagaggggctacgtaaaggcaggaccctggactcctgaagctgctgtggagcacccagaagcagttcgccagcttcatcgagagttcctcagagctggctcaaacgtcatgcagaccttcaccttctatgcgagtgaagacaagctggagaacaggggcaactatgtcttagagaagatatctgggcaggaagtcaatgaagctgcttgcgacatcgcccgacaagtggctgatgaaggagatgctttggtagcaggaggagtgagtcagacaccttcataccttagctgcaagagtgaaactgaagtcaaaaaagtatttctgcaacagttagaggtctttatgaagaagaacgtggacttcttgattgcagagtattttgaacacgttgaagaagctgtgtgggcagttgaaaccttgatagcatccggtaaacctgtggcagcaaccatgtgcattggcccagaaggagatttgcatggcgtgccccccggcgagtgtgcagtgcgcctggtgaaagcaggagcatccatcattggtgtgaactgccactttgaccccaccattagtttaaaaacagtgaagctcatgaaggagggcttggaggctgcccaactgaaagctcacctgatgagccagcccttggcttaccacactcctgactgcaacaagcagggattcatcgatctcccagaattcccatttggactggaacccagagttgccaccagatgggatattcaaaaatacgccagagaggcctacaacctgggggtcaggtacattggcgggtgctgtggatttgagccctaccacatcagggcaattgcagaggagctggccccagaaaggggctttttgccaccagcttcagaaaaacatggcagctggggaagtggtttggacatgcacaccaaaccctgggttagagcaagggccaggaaggaatactgggagaatcttcggatagcctcaggccggccatacaacccttcaatgtcaaagccagatggctggggagtgaccaaaggaacagccgagctgatgcagcagaaagaagccacaactgagcagcagctgaaagagctctttgaaaaacaaaaattcaaatcacagtagcctcgatagaagctatttttgatgaatttctaggtgtttgggtcacagttcctacaaatacggaaaagggggttaaaaagcagtgctttcatgaatgccatcctacacatattattgctattacctgaacaaaatagaattacaaatagcacttgataattttaaagtatgttttagaaattttcttaggagcaaaataagtacaaagtaaatcttgaacaggttcactaagcacccaccctgtgaaaagtattatggaaatcactgcagcacaggaaaagtaattcagatgttaatgccacttgaagaagttggtaggctagcaaagaggatgagacatgaactgtcataaaggactcagcaaccagccagggacagataaagcgctatggaaaggggcttccaagttcttttgaacatgacccttagtaacaaacacaatttatataatgacccagcaaaacacatcacatcttactgtcgaaattaaatgtgtgatccatcctagtattttctgttccattccttttcattctatttcatttataaaacatgctagttgagacttttcaaatggatttttatgacccactactgggtttggatccacagtttgaaaaatattgctacaagacacttaaggagaccatcctgtttaagtttattcttataagtaggtcagtcatatgagacctgatcaataaatatccaatacccagagtcctgctctcagagttcttctgtttcgtgacccacttttctaccagtaaaagacatagaccaatggggaggaggggaggagagatggatatttcagccctctccatcctagtcaacactggatccacctagtgcctctgggccataaggctgagcagagtgagcttgtattagttggtagcttttaaaaaatataataaaaaaaaagtagagattctccaaactctagcctggtttcctagattgagaactatgatatttttctctgataatttaatatctactctcctacaaaagctcaagcctgaagatacaagactattagaagaaacatgactaccctcagtgtattagaaaagaggtcatgcagctttctaaacattattgaattgtttgagctgttttgaaattgtaattcttttcagctattaaaaagaagagcaatgagaaaaa

SEQ ID NO: 66 - protein, 406 aa, Homo Sapiens
MPPVGGKKAKKGILERLNAGEIVIGDGGFVFALEKRGYVKAGPWTPEAAVEHPEAVRQLHREFLRAGSNVMQTFTFYASEDKLENRGNYVLEKISGQEVNEAACDIARQVADEGDALVAGGVSQTPSYLSCKSETEVKKVFLQQLEVFMKKNVDFLIAEYFEHVEEAVWAVETLIASGKPVAATMCIGPEGDLHGVPPGECAVRLVKAGASIIGVNCHFDPTISLKTVKLMKEGLEAAQLKAHLMSQPLAYHTPDCNKQGFIDLPEFPFGLEPRVATRWDIQKYAREAYNLGVRYIGGCCGFEPYHIRAIAEELAPERGFLPPASEKHGSWGSGLDMHTKPWVRARARKEYWENLRIASGRPYNPSMSKPDGWGVTKGTAELMQQKEATTEQQLKELFEKQKFKSQ

SEQ ID NO: 67 - DNA, 2057 bp, Homo Sapiens
  CDS (133)...(1878)
cgtccggtgagaaaggagggccagccagttgggtgggggagagggcccgaggcccgggggcaggagtgcagggctctgaggcggggagaggagaggagagaagagccgcggggggcccagcccggagccaggatgcccgcgccgcgcgcccgggagcagccccgcgtgcccggggagcgccagccgctgctgcctcgcggtgcgcggggccctcgacggtggcggcgggcggcgggcgcggccgtgctgctggtggagatgctggagcgcgccgccttcttcggcgtcaccgccaacctcgtgctgtacctcaacagcaccaacttcaactggaccggcgagcaggcgacgcgcgccgcgctggtattcctgggcgcctcctacctgctggcgcccgtgggcggctggctggccgacgtgtacctgggccgctaccgcgcggtcgcgctcagcctgctgctctacctggccgcctcgggcctgctgcccgccaccgccttccccgacggccgcagctccttctgcggagagatgcccgcgtcgccgctgggacctgcctgcccctcggccggctgcccgcgctcctcgcccagcccctactgcgcgcccgtcctctacgcgggcctgctgctactcggcctggccgccagctccgtccggagcaacctcacctccttcggtgccgaccaggtgatggatctcggccgcgacgccacccgccgcttcttcaactggttttactggagcatcaacctgggtgctgtgctgtcgctgctggtggtggcgtttattcagcagaacatcagcttcctgctgggctacagcatccctgtgggctgtgtgggcctggcatttttcatcttcctctttgccacccccgtcttcatcaccaagcccccgatgggcagccaagtgtcctctatgcttaagctcgctctccaaaactgctgcccccagctgtggcaacgacactcggccagagaccgtcaatgtgcccgcgtgctggccgacgagaggtctccccagccaggggcttccccgcaagaggacatcgccaacttccaggtgctggtgaagatcttgcccgtcatggtgaccctggtgccctactggatggtctacttccagatgcagtccacctatgtcctgcagggtcttcacctccacatcccaaacattttcccagccaacccggccaacatctctgtggccctgagagcccagggcagcagctacacgatcccggaagcctggctcctcctggccaatgttgtggtggtgctgattctggtccctctgaaggaccgcttgatcgaccctttactgctgcggtgcaagctgcttccctctgctctgcagaagatggcgctggggatgttctttggttttacctccgtcattgtggcaggagtcctggagatggagcgcttacactacatccaccacaacgagaccgtgtcccagcagattggggaggtcctgtacaacgcggcaccactgtccatctggtggcagatccctcagtacctgctcattgggatcagtgagatctttgccagcatcccaggcctggagtttgcctactcagaggccccgcgctccatgcagggcgccatcatgggcatcttcttctgcctgtcgggggtgggctcactgttgggctccagcctagtggcactgctgtccttgcccgggggctggctgcactgccccaaggactttgggaacatcaacaattgccggatggacctctacttcttcctgctggctggcattcaggccgtcacggctctcctatttgtctggatcgctggacgctatgagagggcgtcccagggcccagcctcccacagccgtttcagcagggacaggggctgaacaggccctattccagcccccttgcttcactctaccggacagacggcagcagtcccagctctggtttccttctcggtttattctgttagaatgaaatggttcccataaataaggggcatgagcccttcctcacgaaaaaaaaaaaaaaaaaaaaaaaaaggtttgcggccgcaagctta

SEQ ID NO: 68 - protein, 581 aa, Homo Sapiens
MPAPRAREQPRVPGERQPLLPRGARGPRRWRRAAGAAVLLVEMLERAAFFGVTANLVLYLNSTNFNWTGEQATRAALVFLGASYLLAPVGGWLADVYLGRYRAVALSLLLYLAASGLLPATAFPDGRSSFCGEMPASPLGPACPSAGCPRSSPSPYCAPVLYAGLLLLGLAASSVRSNLTSFGADQVMDLGRDATRRFFNWFYWSINLGAVLSLLVVAFIQQNISFLLGYSIPVGCVGLAFFIFLFATPVFITKPPMGSQVSSMLKLALQNCCPQLWQRHSARDRQCARVLADERSPQPGASPQEDIANFQVLVKILPVMVTLVPYWMVYFQMQSTYVLQGLHLHIPNIFPANPANISVALRAQGSSYTIPEAWLLLANVVVVLILVPLKDRLIDPLLLRCKLLPSALQKMALGMFFGFTSVIVAGVLEMERLHYIHHNETVSQQIGEVLYNAAPLSIWWQIPQYLLIGISEIFASIPGLEFAYSEAPRSMQGAIMGIFFCLSGVGSLLGSSLVALLSLPGGWLHCPKDFGNINNCRMDLYFFLLAGIQAVTALLFVWIAGRYERASQGPASHSRFSRDRG

SEQ ID NO: 69 - DNA, 2109 bp, Homo Sapiens
  CDS (1)...(2109)
atggaccaacatcaacatttgaataaaacagcagagtcagcatcttcagagaaaaagaaaacaagacgctgcaatggattcaagatgttcttggcagccctgtcattcagctatattgctaaagcactaggtggaatcattatgaaaatttccatcactcaaatagaaaggagatttgacatatcctcttctcttgctggtttaattgatggaagctttgaaattggaaatttgcttgtgattgtatttgtaagttactttggatctaaactacacagaccgaagttaattggaattggttgtctccttatgggaactggaagtattttgacatctttaccacatttcttcatgggatattataggtattctaaagaaacccatattaatccatcagaaaattcaacatcaagtttatcaacctgtttaattaatcaaaccttatcattcaatggaacatcacctgagatagtagaaaaagattgtgtaaaggaatctgggtcacacatgtggatctatgtcttcatggggaatatgcttcgtggcataggggaaacccccatagtaccattggggatttcatacattgatgattttgcaaaagaaggacattcttccttgtatttaggtagtttgaatgcaataggaatgattggtccagtcattggctttgcactgggatctctgtttgctaaaatgtacgtggatattggatatgtagatctgagcactatcagaataactcctaaggactctcgttgggttggagcttggtggcttggtttccttgtgtctggactattttccattatttcttccataccattttttttcttgccgaaaaatccaaataaaccacaaaaagaaagaaaaatttcactatcattgcatgtgctgaaaacaaatgatgatagaaatcaaacagctaatttgaccaaccaaggaaaaaatgttaccaaaaatgtgactggttttttccagtctttgaaaagcatccttaccaatcccctgtatgttatatttctgcttttgacattgttacaagtaagcagctttattggttcttttacttacgtctttaaatatatggagcaacagtacggtcagtctgcatctcatgctaactttttgttgggaatcataaccattcctacggttgcaactggaatgtttttaggaggatttatcattaaaaaattcaaattgtctttagttggaattgccaaattttcatttcttacttcgatgatatccttcttgtttcaacttctatatttccctctaatctgcgaaagcaaatcagttgccggcctaaccttgacctatgatggaaataattcagtggcatctcatgtagatgtaccactttcttattgcaactcagagtgcaattgtgatgaaagtcagtgggaaccagtctgtgggaacaatggaataacttacctgtcaccttgtctagcaggatgcaaatcctcaagtggtattaaaaagcatacagtgttttataactgtagttgtgtggaagtaactggtctccagaacagaaattactcagcacacttgggtgaatgcccaagagataatacttgtacaaggaaatttttcatctatgttgcaattcaagtcataaactctttgttctctgcaacaggaggtaccacatttatcttgttgactgtgaagattgttcaacctgaattgaaagcacttgcaatgggtttccagtcaatggttataagaacactaggaggaattctagctccaatatattttggggctctgattgataaaacatgtatgaagtggtccaccaacagctgtggagcacaaggagcttgtaggatatataattccgtattttttggaagggtctacttgggcttatctatagctttaagattcccagcacttgttttatatattgttttcatttttgctatgaagaaaaaatttcaaggaaaagataccaaggcatcggacaatgaaagaaaagtaatggatgaagcaaacttagaattcttaaataatggtgaacattttgtaccttctgctggaacagatagtaaaacatgtaatttggacatgcaagacaatgctgctgccaactaa

SEQ ID NO: 70 - protein, 702 aa, Homo Sapiens
MDQHQHLNKTAESASSEKKKTRRCNGFKMFLAALSFSYIAKALGGIIMKISITQIERRFDISSSLAGLIDGSFEIGNLLVIVFVSYFGSKLHRPKLIGIGCLLMGTGSILTSLPHFFMGYYRYSKETHINPSENSTSSLSTCLINQTLSFNGTSPEIVEKDCVKESGSHMWIYVFMGNMLRGIGETPIVPLGISYIDDFAKEGHSSLYLGSLNAIGMIGPVIGFALGSLFAKMYVDIGYVDLSTIRITPKDSRWVGAWWLGFLVSGLFSIISSIPFFFLPKNPNKPQKERKISLSLHVLKTNDDRNQTANLTNQGKNVTKNVTGFFQSLKSILTNPLYVIFLLLTLLQVSSFIGSFTYVFKYMEQQYGQSASHANFLLGIITIPTVATGMFLGGFIIKKFKLSLVGIAKFSFLTSMISFLFQLLYFPLICESKSVAGLTLTYDGNNSVASHVDVPLSYCNSECNCDESQWEPVCGNNGITYLSPCLAGCKSSSGIKKHTVFYNCSCVEVTGLQNRNYSAHLGECPRDNTCTRKFFIYVAIQVINSLFSATGGTTFILLTVKIVQPELKALAMGFQSMVIRTLGGILAPIYFGALIDKTCMKWSTNSCGAQGACRIYNSVFFGRVYLGLSIALRFPALVLYIVFIFAMKKKFQGKDTKASDNERKVMDEANLEFLNNGEHFVPSAGTDSKTCNLDMQDNAAAN

SEQ ID NO: 71 - DNA, 6780 bp, Homo Sapiens
  CDS (290)...(5425)
  misc_feature (1)...(6780): n = A,T,C or G
gggcggggctgagggcggcgggggcgggccgcccgagctgggagggcggcggcgccgaggggaggagagcggcccatggacccgcggggcccggcgccccagactctgcgccgtcgggacggagcccaagatgtcggcctaggccggggcgcgacgacgcggacggggcggcgaggaggcgccgctgctgccggggctcgcagccgccgagcccccgagggcgcgccctgacggactggccgagccggcggtgagaggccggcgcgtctggagcgggccgcgcggcaccatgtcggccaaggtgcggctcaagaagctggagcagctgctcctggacgggccctggcgcaacgagagcgccctgagcgtggaaacgctgctcgacgtgctcgtctgcctgtacaccgagtgcagccactcggccctgcgccgcgacaagtacgtggccgagttcctcgagtgggctaaaccatttacacagctggtgaaagaaatgcagcttcatcgagaagactttgaaataattaaagtaattggaagaggtgcttttggtgaggttgctgttgtcaaaatgaagaatactgaacgaatttatgcaatgaaaatcctcaacaagtgggagatgctgaaaagagcagagaccgcgtgcttccgagaggagcgcgatgtgctggtgaacggcgactgccagtggatcaccgcgctgcactacgcctttcaggacgagaaccacctgtacttagtcatggattactatgtgggtggtgatttactgaccctgctcagcaaatttgaagacaagcttccggaagatatggcgaggttctacattggtgaaatggtgctggccattgactccatccatcagcttcattacgtgcacagagacattaaacctgacaatgtccttttggacgtgaatggtcatatccgcctggctgactttggatcatgtttgaagatgaatgatgatggcactgtgcagtcctccgtggccgtgggcacacctgactacatctcgccggagatcctgcaggcgatggaggacggcatgggcaaatacgggcctgagtgtgactggtggtctctgggtgtctgcatgtatgagatgctctatggagaaacgccgttttatgcggagtcactcgtggagacctatgggaagatcatgaaccatgaagagcgattccagttcccatcccatgtcacggatgtatctgaagaagcgaaggacctcatccagagactgatctgcagtagagaacgccggctggggcagaatggaatagaggatttcaaaaagcatgcgttttttgaaggtctaaattgggaaaatatacgaaacctagaagcaccttatattcctgatgtgagcagtccctctgacacatccaacttcgacgtggatgacgacgtgctgagaaacacggaaatattacctcctggttctcacacaggcttttctggattacatttgccattcattggttttacattcacaacggaaagctgtttttctgatcgaggctctctgaagagcataatgcagtccaacacattaaccaaagatgaggatgtgcagcgggacctggagcacagcctgcagatggaagcttacgagaggaggattcggaggctggaacaggagaagctggagctgagcaggaagctgcaagagtccacccagaccgtgcagtccctccacggctcatctcgggccctcagcaattcaaaccgagataaagaaatcaaaaagctaaatgaagaaatcgaacgcttgaagaataaaatagcagattcaaacaggctggagcgacagcttgaggacacagtggcgcttcgccaagagcgtgaggactccacgcagcggctgcgggggctggagaagcagcaccgcgtggtccggcaggagaaggaggagctgcacaagcaactggttgaagcctcagagcggttgaaatcccaggccaaggaactcaaagatgcccatcagcagcgaaagctggccctgcaggagttctcggagctgaacgagcgcatggcagagctccgtgcccagaagcagaaggtgtcccggcagctgcgagacaaggaggaggagatggaggtggccacgcagaaggtggacgccatgcggcaggaaatgcggagagctgagaagctcaggaaagagctggaagctcagcttgatgatgctgttgctgaggcctccaaggagcgcaagcttcgtgagcacagcgagaacttctgcaagcaaatggaaagcgagctggaggccctcaaggtgaagcaaggaggccggggagcgggtgccaccttagagcaccagcaagagatttccaaaatcaaatccgagctggagaagaaagtcttattttatgaagaggaattggtcagacgtgaggcctcccatgtgctagaagtgaaaaatgtgaagaaggaggtgcatgattcagaaagccaccagctggccctgcagaaagaaatcttgatgttaaaagataagttagaaaagtcaaagcgagaacggcataacgagatggaggaggcagtaggtacaataaaagataaatacgaacgagaaagagcgatgctgtttgatgaaaacaagaagctaactgctgaaaatgaaaagctctgttcctttgtggataaactcacagctcaaaatagacagctggaggatgagctgcaggatctggcagccaagaaggagtcagtggcccactgggaagctcagattgcggaaatcattcagtgggtcagtgacgagaaagatgcccggggttaccttcaagctcttgcttccaagatgaccgaagagctcgaggctttgaggagttctagtctggggtcaagaacactggacccgctgtggaaggtgcgccgcagccagaagctggacatgtccgcgcggctggagctgcagtcggccctggaggcggagatccgggccaagcagcttgtccaggaggagctcaggaaggtcaaggacgccaacctcaccttggaaagcaaactaaaggattccgaagccaaaaacagagaattattagaagaaatggaaattttgaagaaaaagatggaagaaaaattcagagcagatactgggctcaaacttccagattttcaggattccatttttgagtatttcaacactgctcctcttgcacatgacctgacatttagaaccagctcagctagtgagcaagaaacacaagctccgaagccagaagcgtccccgtcgatgtctgtggctgcatcagagcagcaggaggacatggctcggcccccgcagaggccatccgctgtgccgttgcccaccacgcaggccctggttctggctggaccgaagccaaaagctcaccagttcagcatcaagtccttctccagccctactcagtgcagccactgcacctccctgatggttgggctgatccggcagggctacgcctgcgaggtgtgttcctttgcttgccacgtgtcctgcaaagacggtgccccccaggtgtgcccaatacctcccgagcagtccaagaggcctctgggcgtggacgtgcagcgaggcatcggaacagcctacaaaggccatgtcaaggtcccaaagcccacgggggtgaagaagggatggcagcgcgcatatgcagtcgtctgtgagtgcaagctcttcctgtatgatctgcctgaaggaaaatccacccagcctggtgtcattgcgagccaagtcttggatctcagagatgacgagttttccgtgagctcagtcctggcctcagatgtcattcatgctacacgccgagatattccatgtatattcagggtgacggcctctctcttaggtgcaccttctaagaccagctcgctgctcattctgacagaaaatgagaatgaaaagaggaagtgggttgggattctagaaggactccagtccatccttcataaaaaccggctgaggaatcaggtcgtgcatgttcccttggaagcctacgacagctcgctgcctctcatcaaggccatcctgacagctgccatcgtggatgcagacaggattgcagtcggcctagaagaagggctctatgtcatagaggtcacccgagatgtgatcgtccgtgccgctgactgtaagaaggtacaccagatcgagcttgctcccagggagaagatcgtaatcctcctctgtggccggaaccaccatgtgcacctctatccgtggtcgtcccttgatggagcggaaggcagctttgacatcaagcttccggaaaccaaaggctgccagctcatggccacggccacactcaagaggaactctggcacctgcctgtttgtggccgtgaaacggctgatcctttgctatgagatccagagaacgaagccattccacagaaagttcaatgagattgtggctcccggcagcgtgcagtgcctggcggtgctcagggacaggctctgtgtgggctacccttctgggttctgcctgctgagcatccagggggacgggcagcctctaaacctggtaaatcccaatgacccctcgcttgcgttcctctcacaacagtcttttgatgccctttgtgctgtggagctcgaaagcgaggagtacctgctttgcttcagccacatgggactgtacgtggacccgcaaggccggagggcacgcgcgcaggagctcatgtggcctgcggctcctgtcgcctgtagttgcagccccacccacgtcacggtgtacagcgagtatggcgtggacgtctttgatgtgcgcaccatggagtgggtgcagaccatcggcctgcggaggataaggcccctgaactctgaaggcaccctcaacctcctcaactgcgagcctccacgcttgatctacttcaagagcaagttctcgggagcggttctcaacgtgccggacacctccgacaacagcaagaagcagatgctgcgcaccaggagcaaaaggcggttcgtcttcaaggtcccagaggaagagagactgcagcagaggcgagagatgcttagagacccagaattgagatccaaaatgatatccaacccaaccaacttcaaccacgtggcccacatgggcccaggcgacggcatgcaggtgctcatggacctgcctctgagtgctgtgcccccctcccaggaggaaaggccgggccccgctcccaccaacctggctcgccagcctccatccaggaacaagccctacatctcgtggccctcatcaggtggatcggagcctagcgtgactgtgcctctgagaagtatgtctgatccagaccaggactttgacaaagagcctgattcggactccaccaaacactcaactccatcgaatagctccaaccccagcggcccaccgagccccaactccccccacaggagccagctccccctcgaaggcctggagcagccggcctgtgacacctgaagccgccagctcgccacaggggccagggagctggagatggcctccagcgtcagtgccaagactgagcgggccctccagtgttgtccaaggaaatgtagaatcactttgtagatatggagatgaagaagacaaatctttattataatattgatcagttttatgccgcattgttcgtggcagtagaccacatctgttcgtctgcacagctgtgaggcgatgctgttccatctgcacatgaaggacccccatacagcctgtctcccacccctgacaacccgagagggcatatggggccctgccaacaccacttcctcagcagaaacccgtcatgacgcggctgcttcggaagcagacatctggggacacagcctcagtacccagtcttttccctagttcctgaaactttcctaggaccttaagagaatagtaggaggtcctatagcattcccagtgtcactagaattttgaagacaggaaagtggaggttagtctgtggcctttttttcatttagccattgcacagtcagctgcagaagtcctgctgaccacctagtcatggacaaaggcccaggaccagtgacaccctgcgtccctgtgtgcgttaagttcattctgggtcgcagccatgaagtgtcaccagtatctactactgtgaagtcagctgtgctgttttccattcgcttccacggcttctgcctcctgccataaaaccagcgagtgtcgtggtgcaggcaggccctgtggcctgctgggctgagggaagtcagagccccagggcgccacgaagcagccactgggataccccaccccgccccgccnncccccccccccccnccagtcnagncccgaaatggagcccccgtgattagtagcccgtatgatcacgtagacccacccaacacactcctgcacactggccccggcccacggcacagcaatcccctgcgcgtggatttcacctcaccctttgtaccagatgttgagtgaccagctctgtggccctgtgtcgtcagaggcttgtgattaactgtggcggcagacacagcttgtccacagcttgggccaggcttcccctgtcctcccaccggtcggctgcttggcaaggctgttcaggacgtgcacttccccaagtcggcactgagtggcccagcaccacctagccctgccaccccactgccctcctgggccttctgctggatgggcacctggggggttctggttttttacttttttaatgtaagtctcagtctttgtaattaattattgaattgtgagaacatttttgaacaatttacctgtcaataaagcagaagacggcagttttaaagttaaaaaaaaaaaaaaaaaaaaaaaaa

SEQ ID NO: 72 - protein, 1711 aa, Homo Sapiens [sequence omitted]

SEQ ID NO: 73 - DNA, 2699 bp, Homo Sapiens
  CDS (181)...(1671)
gcggccgcggcggcggctggggcgttcgcgggccggcgcgcggcgtgcggggccgtgctgctgacggagctgctggagcgcgccgctttctacggcatcacgtccaacctggtgctattcctgaacggggcgccgttctgctgggagggcgcgcaggccagcgaggcgctgctgctcttcatgggcctcacctacctgggctcgccgttcggaggctggctggccgacgcgcggctgggccgggcgcgcgccatcctgctgagcctggcgctctacctgctgggcatgctggccttcccgctgctggccgcgcccgccacgcgagccgcgctctgcggttccgcgcgcctgctcaactgcacggcgcctggtcccgacgccgccgcccgctgctgctcaccggccaccttcgcggggctggtgctggtgggcctgggcgtggccaccgtcaaggccaacatcacgcccttcggcgccgaccaggttaaagatcgaggtccggaagccactaggagattttttaattggttttattggagcattaacctgggagcgatcctgtcgttaggtggcattgcctatattcagcagaacgtyagctttgtcactggttatgcgatccccactgtctgcgtcggccttgcttttgtggccttcctctgtggccagagcgttttcatcaccaagcctcctgatggcagtgccttcaccgatatgttcaagatactgacgtattcctgctgttcccagaagcgaagtggagagcgccagagtaatggtgaaggcattggagtctttcagcaatcttctaaacaaagtctgtttgattcatgtaagatgtctcatggtgggccatttacagaagagaaagtggaagatgtgaaagctctggtcaagattgtccctgttttcttggctttgataccttactggacagtgtatttccaaatgcagacaacatatgttttacagagtcttcatttgaggattccagaaatttcaaatattacaaccactcctcacacgctccctgcagcctggctgaccatgtttgatgctgtgctcatcctcctgctcatccctctgaaggacaaactggtcgatcccattttgagaagacatggcctgctcccatcctccctgaagaggatcgccgtgggcatgttctttgtcatgtgctcggcctttgctgcaggaattttggagagtaaaaggctgaaccttgttaaagagaaaaccattaatcagaccatcggcaacgtcgtctaccatgctgccgatctgtcgctgtggtggcaggtgccgcagtacttgctgattgggatcagcgagatctttgcaagtatcgcaggcctggaatttgcatactcagctgcccccaagtccatgcagagtgccataatgggcttgttctttttcttctctggcgtcgggtcgttcgtgggttctggactgctggcactggtgtctatcaaagccatcggatggatgagcagtcacacagactttggtaatattaacggctgctatttgaactattactttttccttctggctgctattcaaggagctaccctcctgcttttcctcattatttctgtgaaatatgaccatcatcgagaccatcagcgatcaagagccaatggcgtgcccaccagcaggagggcctgaccttcctgaggccatgtgcggtttctgaggctgacatgtcagtaactgactggggtgcactgagaacaggcaagactttaaattcccataaaatgtctgacttcactgaaacttgcatgttgcctggattgatttcttctttccctctatccaaaggagcttggtaagtgccttactgcagcgtgtctcctggcacgctgggccctccgggaggagagctgcagatttcgagtatgtcgcttgtcattcaaggtctctgtgaatcctctagctgggttcccttttttacagaaactcacaaatggagattgcaaagtcttggggaactccacgtgttagttggcatcccagtttcttaaacaaatagtatcacctgcttcccatagccatatctcactgtaaaaaaaaaaattaataaactgttacttatacttaagaaagtgaggattttttttttttttaaagataaaagcatggtcagatgctgcaaggattttacataaatgccatatttatggtttccttcctgagaacaatcttgctcttgccatgttctttgatttaggctggtagtaaacacatttcatctgctgcttcaaaaagtacttactttttaaaccatcaacattacttttctttcttaaggcaaggcatgcataagagtcatttgagaccatgtgtcccatctcaagccacagagcaactcacggggtacttcacaccttacctagtcagagtgcttatatatagctttattttggtacgattgagactaaagactgatcatggttgtatgtaaggaaaacattcttttgaacagaaatagtgtaattaaaaataattgaaagtgttaaatgtgaacttgagctgtttgaccagtcacatttttgtattgttactgtacgtgtatctggggcttctccgtttgttaatactttttctgtatttgttgctgtatttttggcataactttattataaaaagcatctcaaatgcgaaatccaaaaaaaaaaaaaaaaaaaaaaaaa

SEQ ID NO: 74 - protein, 496 aa, Homo Sapiens
  VARIANT (1)...(496): Xaa = Any Amino Acid
MGLTYLGSPFGGWLADARLGRARAILLSLALYLLGMLAFPLLAAPATRAALCGSARLLNCTAPGPDAAARCCSPATFAGLVLVGLGVATVKANITPFGADQVKDRGPEATRRFFNWFYWSINLGAILSLGGIAYIQQNXSFVTGYAIPTVCVGLAFVAFLCGQSVFITKPPDGSAFTDMFKILTYSCCSQKRSGERQSNGEGIGVFQQSSKQSLFDSCKMSHGGPFTEEKVEDVKALVKIVPVFLALIPYWTVYFQMQTTYVLQSLHLRIPEISNITTTPHTLPAAWLTMFDAVLILLLIPLKDKLVDPILRRHGLLPSSLKRIAVGMFFVMCSAFAAGILESKRLNLVKEKTINQTIGNVVYHAADLSLWWQVPQYLLIGISEIFASIAGLEFAYSAAPKSMQSAIMGLFFFFSGVGSFVGSGLLALVSIKAIGWMSSHTDFGNINGCYLNYYFFLLAAIQGATLLLFLIISVKYDHHRDHQRSRANGVPTSRRA

SEQ ID NO: 75 - DNA, 1335 bp, Homo Sapiens
  CDS (1)...(1335)
atgattgaagacaataaggagaacaaagaccattctttggagagaggaagagcgactctcattttttccttaaagaatgaagttggaggacttataaaagcactgaaaatcttccaggagaaacatgtgaacctgttacatattgagtcccgaaaatctaagagaagaaactcagaatttgagatttttgttgactgtgataccaacagagaacaattgaatgatatttttcatcttctgaagtctcataccaatgttctttctgtgactccaccagataattttactatgaaggaagaaggcatggagagtgttccttggtttccaaagaaaatttcagacctggaccattgtgctaaccgagttctgatgtatggatctgagctagatgcagaccaccctggcttcaaagacaatgtctaccgtaaaagacgaaagtactttgcagactcggctatgagctataaatatggagaccccattcctaaggttgaattcacggaagaggagattaagacctggggaaccgtattccgggagctcaacaaactctatccgacccatgcttgcagagagtatctcaaaaatttacctctgctttccaagtattgtggatatcaggaagacaatatcccacagctggaagatatttcaaactttttaaaagagcgcacaggtttttccattcgtcctgtggctggttacttatcaccaagagatttcttatcaggtttagcctttcgagtttttcactgcactcaatatgtgagacacagttcagaccccttctataccccagagccggatacctgccatgaactcttaggtcacgttccccttttggctgagccaagttttgctcagttctcccaagaaattggcctggcttcccttggagcttcagaggaggctgttcaaaaactggcaacgtgctactttttcactgtggagtttggtctatgtaaacaagacggacagttacgagtcttcggcgctggcttactttcttctatcagtgaactcaaacatgtgctttctggacatgccaaagtaaagccttttgatcccaagattacctgcaaacaagaatgcctcatcacaacttttcaggatgtctactttgtatctgaaagttttgaagatgcaaaggagaagatgagagaatttaccaaaacaattaagcgtccctttggagtgaaatataatccctacacacgaagcattcagatcctgaaagacgccaaaagcataacgaatgccatgaacgagctgcggcatgatcttgacgttgtcagcgacgcccttgggaaggtcagcaggaagccgagtatctaa

SEQ ID NO: 76 - protein, 444 aa, Homo Sapiens [sequence omitted]

SEQ ID NO: 77 - DNA, 2534 bp, Homo Sapiens
  CDS (118)...(1230)
cctgctctgcacctgtcgtcgactgccagccggctgagggcgggggtctccacggtggtcccagctcccaaggaggttgcagaagtaccgtacagagtggatttgcagggcagtggcatggagcccctcttccccgcgccgttctgggaggttatctacggcagccaccttcagggcaacctgtccctcctgagccccaaccacagtctgctgcccccgcatctgctgctcaatgccagccacggcgccttcctgcccctcgggctcaaggtcaccatcgtggggctctacctggccgtgtgtgtcggagggctcctggggaactgccttgtcatgtacgtcatcctcaggcacaccaaaatgaagacagccaccaatatttacatctttaacctggccctggccgacactctggtcctgctgacgctgcccttccagggcacggacatcctcctgggcttctggccgtttgggaatgcgctgtgcaagacagtcattgccattgactactacaacatgttcaccagcaccttcaccctaactgccatgagtgtggatcgctatgtagccatctgccaccccatccgtgccctcgacgtccgcacgtccagcaaagcccaggctgtcaatgtggccatctgggccctggcctctgttgtcggtgttcccgttgccatcatgggctcggcacaggtcgaggatgaagagatcgagtgcctggtggagatccctacccctcaggattactggggcccggtgtttgccatctgcatcttcctcttctccttcatcgtccccgtgctcgtcatctctgtctgctacagcctcatgatccggcggctccgtggagtccgcctgctctcgggctcccgagagaaggaccggaacctgcggcgcatcactcggctggtgctggtggtagtggctgtgttcgtgggctgctggacgcctgtccaggtcttcgtgctggcccaagggctgggggttcagccgagcagcgagactgccgtggccattctgcgcttctgcacggccctgggctacgtcaacagctgcctcaaccccatcctctacgccttcctggatgagaacttcaaggcctgcttccgcaagttctgctgtgcatctgccctgcgccgggacgtgcaggtgtctgaccgcgtgcgcagcattgccaaggacgtggccctggcctgcaagacctctgagacggtaccgcggcccgcatgactaggcgtggacctgcccatggtgcctgtcagcccgcagagcccatctacgcccaacacagagctcacacaggtcactgctctctaggcggacacaccctgggccctgagcatccagagcctgggatgggcttttccctgtgggccagggatgctcggtcccagaggaggacctagtgacatcatgggacaggtcaaagcattagggccacctccatggccccagacagactaaagctgccctcctggtgcagggccgaggggacacaaggacctacctggaagcagctgacatgctggtggacggccgttactggagcccgtgcccctccctccccgtgcttcatgtgactcttggcctctctgctgctgcgttggcagaaccctgggtgggcaggcacccggaggaggagcagcagctgtgtcatcctgtgccccccatgtgctgtgtgctgtttgcatggcagggctccagctgccttcagccctgtgacgtctcctcagggcagctggacaggcttggcacggcccgggaagtgcagcaggcagcttttctttggggtgggacttgccctgagcttggagctgccacctggaggacttgcctgttccgactccacctgtgcagccggggccaccccaggagaaagtgtccaggtgggggctggcagtccctggctgcagaccccgagctggccctcggaccgcacctctgaaggttttctgtgtgctgcacggtgcaggcctcatccctgactgcagcttgactctgggcccaacccccatttcccttcaggagaccagcgagaggccctggccatccctccagcggtgcaatgaactatatgctgtggaccgtcaacccagccctgcttctcagtgtggggcaggtgtctcaggacgaaggcgccgcgtgaccacatgggcagctctgttcacaaagtggaggcctcgttttcctggtcttgactgctctgtttgggtgggagaagattctctgggggtccccacatcctcccaaggctcccctcacagcctctcctttgcttgaagccagaggtcagtggccgtgctgtgttgcggggaagctgtgtggaaggagaagctggtggccacagcagagtcctgctctggggacgcctgcttcatttacaagcctcaagatggctctgtgtagggcctgagcttgctgcccaacgggaggatggcttcacagcagagccagcatgaggggtggggcctggcagggcttgcttgagccaaactgcaaaggctgtggtggctgtgaggacactgcgggggttg

SEQ ID NO: 78 - protein, 370 aa, Homo Sapiens
MEPLFPAPFWEVIYGSHLQGNLSLLSPNHSLLPPHLLLNASHGAFLPLGLKVTIVGLYLAVCVGGLLGNCLVMYVILRHTKMKTATNIYIFNLALADTLVLLTLPFQGTDILLGFWPFGNALCKTVIAIDYYNMFTSTFTLTAMSVDRYVAICHPIRALDVRTSSKAQAVNVAIWALASVVGVPVAIMGSAQVEDEEIECLVEIPTPQDYWGPVFAICIFLFSFIVPVLVISVCYSLMIRRLRGVRLLSGSREKDRNLRRITRLVLVVVAVFVGCWTPVQVFVLAQGLGVQPSSETAVAILRFCTALGYVNSCLNPILYAFLDENFKACFRKFCCASALRRDVQVSDRVRSIAKDVALACKTSETVPRPA

SEQ ID NO: 79 - DNA, 5296 bp, Homo Sapiens
  CDS (176)...(5029)
ctgctggagtaggcacccatttaaagaaaaaatgaagaagcagcaataaagaagttgtaatcgttacctagacaaacagagaactggttttgacagtgtttctagagtgctttttattattttcctgacagttgtgttccaccatgattactttctccttcagcgaataggctaaatgaatatgaaacagaaaagcgtgtatcagcaaaccaaagcacttctgtgcaagaattttcttaagaaatggaggatgaaaagagagagcttattggaatggggcctctcaatacttctaggactgtgtattgctctgttttccagttccatgagaaatgtccagtttcctggaatggctcctcagaatctgggaagggtagataaatttaatagctcttctttaatggttgtgtatacaccaatatctaatttaacccagcagataatgaataaaacagcacttgctcctcttttgaaaggaacaagtgtcattggggcaccaaataaaacacacatggacgaaatacttctggaaaatttaccatatgctatgggaatcatctttaatgaaactttctcttataagttaatatttttccagggatataacagtccactttggaaagaagatttctcagctcattgctgggatggatatggtgagttttcatgtacattgaccaaatactggaatagaggatttgtggctttacaaacagctattaatactgccattatagaaatcacaaccaatcaccctgtgatggaggagttgatgtcagttactgctataactatgaagacattacctttcataactaaaaatcttcttcacaatgagatgtttattttattcttcttgcttcatttctccccacttgtatattttatatcactcaatgtaacaaaagagagaaaaaagtctaagaatttgatgaaaatgatgggtctccaagattcagcattctggctctcctggggtctaatctatgctggcttcatctttattatttccatattcattacaattatcataacattcacccaaattatagtcatgactggcttcatggtcatatttatactcttttttttatatggcttatctttggtagctttggtgttcctgatgagtgtgctgttaaagaaagctgtcctcaccaatttggttgtgtttctccttaccctcttttggggatgtctgggattcactgtattttatgaacaacttccttcatctctggagtggattttgaatatttgtagcccttttgcctttactactggaatgattcagattatcaaactggattataacttgaatggtgtaatttttcctgacccttcaggagactcatatacaatgatagcaactttttctatgttgcttttggatggtctcatctacttgctattggcattatactttgacaaaattttaccctatggagatgagcgccattattctcctttatttttcttgaattcatcatcttgtttccaacaccaaaggactaatgctaaggttattgagaaagaaatcgatgctgagcatccctctgatgattattttgaaccagtagctcctgaattccaaggaaaagaagccatcagaatcagaaatgttaagaaggaatataaaggaaaatctggaaaagtggaagcattgaaaggcttgctctttgacatatatgaaggtcaaatcacggcaatcctgggtcacagtggagctggcaaatcttcactgctaaatattcttaatggattgtctgttccaacagaaggatcagttaccatctataataaaaatctctctgaaatgcaagacttggaggaaatcagaaagataactggcgtctgtcctcaattcaatgttcaatttgacatactcaccgtgaaggaaaacctcagcctgtttgctaaaataaaagggattcatctaaaggaagtggaacaagaggtacaacgaatattattggaattggacatgcaaaacattcaagataaccttgctaaacatttaagtgaaggacagaaaagaaagctgacttttgggattaccattttaggagatcctcaaattttgcttttagatgaaccaactactggattggatcccttttccagagatcaagtgtggagcctcctgagagagcgtagagcagatcatgtgatccttttcagtacccagtccatggatgaggctgacatcctggctgatagaaaagtgatcatgtccaatgggagactgaagtgtgcaggttcttctatgtttttgaaaagaaggtggggtcttggatatcacctaagtttacataggaatgaaatatgtaacccagaacaaataacatccttcattactcatcacatccccgatgctaaattaaaaacagaaaacaaagaaaagcttgtatatactttgccactggaaaggacaaatacatttccagatcttttcagtgatctggataagtgttctgaccagggagtgacaggttatgacatttccatgtcaactctaaatgaagtctttatgaaactggaaggacagtcaactatcgaacaagatttcgaacaagtggagatgataagagactcagaaagcctcaatgaaatggagctggctcactcttccttctctgaaatgcagacagctgtgagtgacatgggcctctggagaatgcaagtctttgccatggcacggctccgtttcttaaagttaaaacgtcaaactaaagtgttattgaccctattattggtatttggaatcgcaatattccctttgattgttgaaaatataatatatgctatgttaaatgaaaagatcgattgggaatttaaaaacgaattgtattttctctctcctggacaacttccccaggaaccccgtaccagcctgttgatcatcaataacacagaatcaaatattgaagattttataaaatcactgaagcatcaaaatatacttttggaagtagatgactttgaaaacagaaatggtactgatggcctctcatacaatggagctatcatagtttctggtaaacaaaaggattatagattttcagttgtgtgtaataccaagagattgcactgttttccaattcttatgaatattatcagcaatgggctacttcaaatgtttaatcacacacaacatattcgaattgagtcaagcccatttcctcttagccacataggactctggactgggttgccggatggttcctttttcttatttttggttctatgtagcatttctccttatatcaccatgggcagcatcagtgattacaagaaaaatgctaagtcccagctatggatttcaggcctctacacttctgcttactggtgtgggcaggcactagtggacgtcagcttcttcattttaattctccttttaatgtatttaattttctacatagaaaacatgcagtaccttcttattacaagccaaattgtgtttgctttggttatagttactcctggttatgcagcttctcttgtcttcttcatatatatgatatcatttatttttcgcaaaaggagaaaaaacagtggcctttggtcattttacttcttttttgcctccaccatcatgttttccatcactttaatcaatcattttgacctaagtatattgattaccaccatggtattggttccttcatataccttgcttggatttaaaacttttttggaagtgagagaccaggagcactacagagaatttccagaggcaaattttgaattgagtgccactgattttctagtctgcttcataccctactttcagactttgctattcgtttttgttctaagatgcatggaactaaaatgtggaaagaaaagaatgcgaaaagatcctgttttcagaatttccccccaaagtagagatgctaagccaaatccagaagaacccatagatgaagatgaagatattcaaacagaaagaataagaacagccactgctctgaccacttcaatcttagatgagaaacctgttataattgccagctgtctacacaaagaatatgcaggccagaagaaaagttgcttttcaaagaggaagaagaaaatagcagcaagaaatatctctttctgtgttcaagaaggtgaaattttgggattgctaggacccagtggtgctggaaaaagttcatctattagaatgatatctgggatcacaaagccaactgctggagaggtggaactgaaaggctgcagttcagttttgggccacctggggtactgccctcaagagaacgtgctgtggcccatgctgacgttgagggaacacctggaggtgtatgctgccgtcaaggggctcaggaaagcggacgcgaggctcgccatcgcaagattagtgagtgctttcaaactgcatgagcagctgaatgttcctgtgcagaaattaacagcaggaatcacgagaaagttgtgttttgtgctgagcctcctgggaaactcacctgtcttgctcctggatgaaccatctacgggcatagaccccacagggcagcagcaaatgtggcaggcaatccaggcagtcgttaaaaacacagagagaggtgtcctcctgaccacccataacctggctgaggcggaagccttgtgtgaccgtgtggccatcatggtgtctggaaggcttagatgcattggctccatccaacacctgaaaaacaaacttggcaaggattacattctagagctaaaagtgaaggaaacgtctcaagtgactttggtccacactgagattctgaagcttttcccacaggctgcagggcaggaaaggtattcctctttgttaacctataagctgcccgtggcagacgtttaccctctatcacagacctttcacaaattagaagcagtgaagcataactttaacctggaagaatacagcctttctcagtgcacactggagaaggtattcttagagctttctaaagaacaggaagtaggaaattttgatgaagaaattgatacaacaatgagatggaaactcctccctcattcagatgaaccttaaaacctcaaacctagtaattttttgttgatctcctataaacttatgttttatgtaataattaatagtatgtttaattttaaagatcatttaaaattaacatcaggtatattttgtaaatttagttaacaaatacataaattttaaaattattcttcctctcaaacataggggtgatagcaaacctgtgataaaggcaatacaaaatattagtaaagtcacccaaagagtcaggcactgggtattgtggaaataaaactatataaactt

SEQ ID NO: 80 - protein, 1617 aa, Homo Sapiens [sequence omitted]

SEQ ID NO: 81 - DNA, 1928 bp, Homo Sapiens
  CDS (167)...(1585)
agggctgcagtcacggggcggcgcggagggccccagcccagtcaggggtgtggccgccgccaccgtaaggctaggccgcgagcttagtcctgggagccgcctccgtcgccgccgtcagagccgccctatcagattatcttaacaagaaaaccaactggaaaaaaaaatgaaattccttatcttcgcatttttcggtggtgttcaccttttatccctgtgctctgggaaagctatatgcaagaatggcatctctaagaggacttttgaagaaataaaagaagaaatagccagctgtggagatgttgctaaagcaatcatcaacctagctgtttatggtaaagcccagaacagatcctatgagcgattggcacttctggttgatactgttggacccagactgagtggctccaagaacctagaaaaagccatccaaattatgtaccaaaacctgcagcaagatgggctggagaaagttcacctggagccagtgagaataccccactgggagaggggagaagaatcagctgtgatgctggagccaagaattcataagatagccatcctgggtcttggcagcagcattgggactcctccagaaggcattacagcagaagttctggtggtgacctctttcgatgaactgcagagaagggcctcagaagcaagagggaagattgttgtttataaccaaccttacatcaactactcaaggacggtgcaataccgaacgcagggggcggtggaagctgccaaggttggggctttggcatctctcattcgatccgtggcctccttctccatctacagtcctcacacaggtattcaggaataccaggatggcgtgcccaagattccaacagcctgtattacggtggaagatgcagaaatgatgtcaagaatggcttctcatgggatcaaaattgtcattcagctaaagatgggggcaaagacctacccagatactgattccttcaacactgtagcagagatcactgggagcaaatatccagaacaggttgtactggtcagtggacatctggacagctgggatgttgggcagggtgccatggatgatggcggtggagcctttatatcatgggaagcactctcacttattaaagatcttgggctgcgtccaaagaggactctgcggctggtgctctggactgcagaagaacaaggtggagttggtgccttccagtattatcagttacacaaggtaaatatttccaactacagtctggtgatggagtctgacgcaggaaccttcttacccactgggctgcaattcactggcagtgaaaaggccagggccatcatggaggaggttatgagcctgctgcagcccctcaatatcactcaggtcctgagccatggagaagggacagacatcaacttttggatccaagctggagtgcctggagccagtctacttgatgacttatacaagtatttcttcttccatcactcccacggagacaccatgactgtcatggatccaaagcagatgaatgttgctgctgctgtttgggctgttgtttcttatgttgttgcagacatggaagaaatgctgcctaggtcctagaaacagtaagaaagaaacgttttcatgcttctggccaggaatcctgggtctgcaactttggaaaactcctcttcacataacaatttcatccaattcatcttcaaagcacaactctatttcatgctttctgttattatctttcttgatactttccaaattctctgattctagaaaaaggaatcattctcccctccctcccaccacatagaatcaacatatggtagggattacagtgggggcatttctttatatcacctcttaaaaacattgtttccactttaaaagtaaacacttaataaatttttggaagaacaaaaaaaaaaaaaaaaaaaaaaaaaaaaaa

SEQ ID NO: 82 - protein, 472 aa, Homo Sapiens
MKFLIFAFFGGVHLLSLCSGKAICKNGISKRTFEEIKEEIASCGDVAKAIINLAVYGKAQNRSYERLALLVDTVGPRLSGSKNLEKAIQIMYQNLQQDGLEKVHLEPVRIPHWERGEESAVMLEPRIHKIAILGLGSSIGTPPEGITAEVLVVTSFDELQRRASEARGKIVVYNQPYINYSRTVQYRTQGAVEAAKVGALASLIRSVASFSIYSPHTGIQEYQDGVPKIPTACITVEDAEMMSRMASHGIKIVIQLKMGAKTYPDTDSFNTVAEITGSKYPEQVVLVSGHLDSWDVGQGAMDDGGGAFISWEALSLIKDLGLRPKRTLRLVLWTAEEQGGVGAFQYYQLHKVNISNYSLVMESDAGTFLPTGLQFTGSEKARAIMEEVMSLLQPLNITQVLSHGEGTDINFWIQAGVPGASLLDDLYKYFFFHHSHGDTMTVMDPKQMNVAAAVWAVVSYVVADMEEMLPRS

SEQ ID NO: 83 - DNA, 3763 bp, Homo Sapiens
  CDS (216)...(3089)
gtcgacccacgcgtccgcgcattcatcctgagtggctggtgggaacgtgaaaagggagaggaaaaggcgcaagaagccagagagaggggtgtgggaaaagcgaaaacaggctgccaaatcaggggattccttccaatttaaaaaggaagtctgctgacgttagttagttaaatttaacatctttttatgtgtaacacttgactttggaagcaaaaatgaactttgcggagagagagggctctaagagatactgcattcaaacgaaacatgtggccattctctgtgcggtggtggtgggtgtaggattaatagtgggacttgccgtgggcttgaccagatcgtgtgactccagcggggacggcgggccgggcactgcgccagctccttcccacctgccttcttccacggccagcccctcaggtcctcctgcccaggaccaggacatctgcccggccagtgaggatgagagcggacagtggaaaaactttcgactgccggacttcgtcaacccagtccactacgacctgcacgtgaagcccctgttggaggaggacacctacacgggcaccgtgagcatctccatcaacctgagcgctcccacccggtacctgtggctgcacctccgggagaccaggatcacccggctcccggagctgaagaggccctctggggaccaggtgcaagtccggaggtgtttcgagtacaaaaagcaggagtacgtggtggtcgaggcggaggaagagcttacccccagcagtggagatggcctgtatctcctgaccatggagttcgccggctggctgaacggctccctcgtgggattttatagaaccacctacacggagaacggacgagtcaagagcatagtggccaccgatcatgaaccaacagatgccaggaaatcttttccttgttttgatgagcccaacaaaaaggcaacttatacaatatctatcacccatcccaaagaatacggagcactttcaaatatgccagtggcgaaagaagagtcagtggatgataaatggactcgaacaacttttgagaagtctgtccccatgagcacgtacctggtgtgctttgctgtacatcaatttgactctgtaaagagaatatcaaatagtggaaaacctcttacaatttatgtccagccagagcaaaagcacacagccgaatatgctgcaaacataactaaaagtgtgtttgattattttgaagaatactttgctatgaattattctcttcctaaattagataaaatcgctattccagattttggcactggtgccatggagaactggggactcatcacgtacagagaaacgaacctgctttatgaccctaaggaatcagcctcatcaaaccaacagagggtggccactgtggttgcccatgaacttgtgcatcagtggtttggaaatattgtgaccatggactggtgggaagacttgtggctaaatgaaggatttgcttctttctttgagtttctgggagtaaaccatgcagaaacagactggcaaatgcgtgaccaaatgttacttgaagatgtattacctgttcaagaggatgattctttgatgtcttcgcatccaattattgtgactgtgacaacccctgatgaaataacatctgtttttgatggaatatcctatagcaagggatcttctattttgagaatgcttgaagactggataaaaccagagaattttcaaaaaggatgtcagatgtacttggaaaaataccaattcaagaatgcaaaaacttctgatttttgggcagcactggaagaggcaagtaggctaccagtgaaagaagtaatggacacctggaccagacagatgggttatcctgtgcttaacgtgaacggtgtcaagaacatcacacagaaacgctttttgttggacccaagagctaacccttctcagcccccttcagatcttggttatacatggaatatcccagttaaatggactgaagataatataacaagcagtgtgttatttaataggtcagaaaaagaaggaatcactttgaactcctctaatcctagtggaaatgcttttctcaaaataaacccagatcatattgggttttatcgtgtaaattatgaagtagcaacttgggactcgatagctacagcgctctccttgaaccacaagacattttcttcagcagatcgtgcaagtcttattgatgatgcttttgccttggcaagagctcaacttctagattataaggtggctttgaacttgaccaagtatctcaaaagggaagagaattttttaccatggcagagagtaatttcagctgtaacctacatcattagcatgtttgaagatgataaagagctatatcctatgattgaggaatacttccaaggtcaagtgaagcctattgcagattctctgggatggaatgatgctggagaccatgtcacaaagttactccgttcctccgtgttagggtttgcgtgcaagatgggagacagagaagccttgaacaatgcttcctcgttatttgagcagtggctaaatgggactgtaagccttcccgtaaatctcaggcttctggtgtatcggtatgggatgcagaactctggcaatgagatttcatggaactacactcttgagcaataccagaaaacttcattagctcaagaaaaagaaaaactgctgtatggattagcatcagtgaagaacgttactcttttgtcaaggtatttggatttgctcaaggacacgaaccttattaaaactcaggatgtgtttacagtcattcgatatatctcatataacagctatgggaagaacatggcctggaattggatacaactcaactgggactatctagtcaacagatatacactcaataacagaaaccttggccgaattgtcacaatagcagagccattcaacactgaactgcaactgtggcagatggagagcttttttgcaaaatatccacaagctggagcaggagaaaaacctagggaacaagtgctggaaacagtgaaaaacaatatagagtggctaaaacaacatagaaacaccatcagagaatggttttttaatttacttgagagtggttaatgtattcaaatgttagagtttaattttgtgaatctattgtttctcctctgaagcatttggtggcctaatttacaagcacgatggagagagccttataaacagataatgcttttactaagcactgtgtttatatgtcttgcaaagcctttaaattgttcctctttgtttatgaagaaagatactaatagagtacttaatatactcagggattccttctaagtgtacttcataagatattctttacaaactgaagataatgaaatagttattttaatacctttaaatatcattctttgtatcttaaatctgtgaagtagaacaatttggtcttagctttacattttcagtaccaaagaaacaccacttaatcttctctcttgattgatttttaaagtttaaataccagtacttgagggaccaatattaccatcttaatctttattttattattcagaattatacagacctaatatcattttattcacatatgtcttactactttaaatcctaccaaagtaacctgggcttaagttttacttgaggatcatatgaattagccaaaagaatggctgactgttgcctttgctcttataaaatcaataagagaactctcctctttttttaaaaataaatctaaatgattatcttgaaaaaaaaaaaaaaagggcggccgc

SEQ ID NO: 84 - protein, 957 aa, Homo Sapiens
MNFAEREGSKRYCIQTKHVAILCAVVVGVGLIVGLAVGLTRSCDSSGDGGPGTAPAPSHLPSSTASPSGPPAQDQDICPASEDESGQWKNFRLPDFVNPVHYDLHVKPLLEEDTYTGTVSISINLSAPTRYLWLHLRETRITRLPELKRPSGDQVQVRRCFEYKKQEYVVVEAEEELTPSSGDGLYLLTMEFAGWLNGSLVGFYRTTYTENGRVKSIVATDHEPTDARKSFPCFDEPNKKATYTISITHPKEYGALSNMPVAKEESVDDKWTRTTFEKSVPMSTYLVCFAVHQFDSVKRISNSGKPLTIYVQPEQKHTAEYAANITKSVFDYFEEYFAMNYSLPKLDKIAIPDFGTGAMENWGLITYRETNLLYDPKESASSNQQRVATVVAHELVHQWFGNIVTMDWWEDLWLNEGFASFFEFLGVNHAETDWQMRDQMLLEDVLPVQEDDSLMSSHPIIVTVTTPDEITSVFDGISYSKGSSILRMLEDWIKPENFQKGCQMYLEKYQFKNAKTSDFWAALEEASRLPVKEVMDTWTRQMGYPVLNVNGVKNITQKRFLLDPRANPSQPPSDLGYTWNIPVKWTEDNITSSVLFNRSEKEGITLNSSNPSGNAFLKINPDHIGFYRVNYEVATWDSIATALSLNHKTFSSADRASLIDDAFALARAQLLDYKVALNLTKYLKREENFLPWQRVISAVTYIISMFEDDKELYPMIEEYFQGQVKPIADSLGWNDAGDHVTKLLRSSVLGFACKMGDREALNNASSLFEQWLNGTVSLPVNLRLLVYRYGMQNSGNEISWNYTLEQYQKTSLAQEKEKLLYGLASVKNVTLLSRYLDLLKDTNLIKTQDVFTVIRYISYNSYGKNMAWNWIQLNWDYLVNRYTLNNRNLGRIVTIAEPFNTELQLWQMESFFAKYPQAGAGEKPREQVLETVKNNIEWLKQHRNTIREWFFNLLESG

SEQ ID NO: 85 - DNA, 1302 bp, Homo Sapiens
  CDS (152)...(1264)
cagaatatcttattacacagaaatcatggatggaaggcaaatttgattatttgttccatcttgtctctcataggaggaaaatatttctaccggtccatagtgtcagagtggtgaacccctgcagccagcaggcctcctgaaaaaaaagtccatgggtgacagaagattcattgacttccaattccaagattcaaattcaagcctcagacccaggttgggcaatgctactgccaataatacttgcattgttgatgattccttcaagtataatctcaatggtgctgtctacagtgttgtattcatcttgggtctgataaccaacagtgtctctctgtttgtcttctgtttccgcatgaaaatgagaagtgagactgctatttttatcaccaatctagctgtctctgatttgctttttgtctgtacactaccttttaaaatattttacaacttcaaccgccactggccttttggtgacaccctctgcaagatctctggaactgcattccttaccaacatctatgggagcatgctctttctcacctgtattagtgtggatcgtttcctggccattgtctatccttttcgatctcgtactattaggactaggaggaattctgccattgtgtgtgctggtgtctggatcctagtcctcagtggcggtatttcagcctctttgttttccaccactaatgtcaacaatgcaaccaccacctgctttgaaggcttctccaaacgtgtctggaagacttatttatccaagatcacaatatttattgaagttgttgggtttatcattcctctaatattgaatgtctcttgctcttctgtggtgctgagaactcttcgcaagcctgctactctgtctcaaattgggaccaataagaaaaaagtactgaaaatgatcacagtacatatggcagtctttgtggtatgctttgtaccctacaactctgtcctcttcttgtatgccctggtgcgctcccaagctattactaattgctttttggaaagatttgcaaagatcatgtacccaatcaccttgtgccttgcaactctgaactgttgttttgaccctttcatctattacttcacccttgaatcctttcagaagtccttctacatcaatgcccacatcagaatggagtccctgtttaagactgaaacacctttgaccacaaagccttcccttccagctattcaagaggaagtgagtgatcaaacaacaaataatggtggtgaattaatgctagaatccaccttttaggtatgagaagatgtgttcaggtcacatggttctctata

SEQ ID NO: 86 - protein, 370 aa, Homo Sapiens
MGDRRFIDFQFQDSNSSLRPRLGNATANNTCIVDDSFKYNLNGAVYSVVFILGLITNSVSLFVFCFRMKMRSETAIFITNLAVSDLLFVCTLPFKIFYNFNRHWPFGDTLCKISGTAFLTNIYGSMLFLTCISVDRFLAIVYPFRSRTIRTRRNSAIVCAGVWILVLSGGISASLFSTTNVNNATTTCFEGFSKRVWKTYLSKITIFIEVVGFIIPLILNVSCSSVVLRTLRKPATLSQIGTNKKKVLKMITVHMAVFVVCFVPYNSVLFLYALVRSQAITNCFLERFAKIMYPITLCLATLNCCFDPFIYYFTLESFQKSFYINAHIRMESLFKTETPLTTKPSLPAIQEEVSDQTTNNGGELMLESTF

SEQ ID NO: 87 - DNA, 2510 bp, Homo Sapiens
  CDS (152)...(1096)
gcacaatctaaagcttgtatatataatggtagtttgtaaagtgtaccttccccacaggacgctgtgggatgtaaatttgtaggtcgagtttacagctggtttttcttgactgaagctcattcaactggttacttctttgtgggtgtctttaatgaagcttataaatggcaaaaagcaaacattcccatggtttggcatggacatcggtggaacgctggttaaattggtgtatttcgagccgaaggatattacagccgaagaggagcaagaggaagtggagaacctgaagagcatccggaagtatttgacttctaatactgcttatgggaaaactgggatccgagacgtccacctggaactgaaaaacctgaccatgtgtggacgcaaaggggacctgcacttcatccgctttcccagctgtgctatgcacaggttcattcagatgggcagcgagaagaacttctctagccttcacaccaccctctgcgccacaggaggcggggctttcaaattcgaagaggacttcagaatgattgctgacctgcagctgcataaactggatgaactggactgtctgattcagggcctgctttatgtcgactctgttggcttcaacggcaagccagaatgttactattttgaaaatcccacaaatcctgaattgtgtcaaaaaaagccgtactgccttgataacccataccctatgttgctggttaacatgggctcaggtgtcagcattctagccgtgtactccaaggacaactataaaagagttacagggaccagctttggcaacatgatgagtaaagaaaagcgagattccatcagcaaggaagacctcgcccgggccacattggtcaccatcaccaacaacattggctccattgctcggatgtgtgcgttgaatgagaacatagacagagttgtgtttgttggaaattttctcagaatcaatatggtctccatgaagctgctggcatatgccatggatttttggtccaaaggacaactgaaagctctgtttttggaacatgagggttattttggagccgttggggcactgttggaactgttcaaaatgactgatgacaagtagagacgagcagtggaggaaacagcctcccaaaaggacagagaactaaaaaattgctgctggagaaggtgaaagtcgctttgggacgggagccaagccattatggcagatgaacctgctggatttgtaaataatttaaaatccttccagatgatcttttactcttaggttttgagctaatgattcaaaacgggggaatataaaaggttttttttctgtatactgtatttttttaaaaaaatggtgcagcgtggccaaacctaccaattgtatgcattaactttgaaaagttgtttgatgtttaagaaggacctgatatgtaagcgctggtcatttttcttctggggtttactgatcagtgtggtgattttaacttcatttagtaattactctaggagattttaccttgacttatatttttcatgacgtttcatgatttgctgttggtttcaaatgaaactacaaatctggcatgttttactgtgaacacttttgttatttgttttgtacccttttttgtcttgtttttctgttttagttgtcttctgaaaaaagagtcattccctctgtttctgtcctcagatgatgtccctccccctacctgtaacctttctttgacataattgttcatatcaatgaaggtgctgaccagctcaatacaaagttaagcacaagatctaaagctcttgaaaatgcccgtgaagagaagactgaatgtgttaatgaatttaatgagtctggcaaaagttgcaaattatatgcaagtttgtcctatcgcttataaatgtagtgtttcattggatttattttatgctaggttatattaagttgaaatagtctgtgattaaatgtcctcatccatgcacagaatatgaatggcagcaaatctttgtgcaagaaatttgaaacttattgggaaaagcctcccagtagattaattgttcatatcaggagatttagggtaagtcatgggttgaggtgtcagatagtaatatctatttgttttgtacatgtatatatctaggaactttgtaacaacacatctttaataatgttaaaggttttttcatttttaatattttaaactaaaaactgtacttcaatctcagtttctaaaattaaaaataatttatactgatctatatattttttctttttgaaagatttcattaagactgatgggtaactttcaaatgagggtcatgtacaaatattgggatgcatgagatcccatgatcttgtgtattgagcttattgttgaaagggatttttgaaggacagaacaattactccatgatgaatcttcctttctctgccttctgagcaccgtctttaatttccatatcttcaagtcttgaagaagttgatgttaattgaagaattcacttgtctggttgaaataaagcctgtttctgtt

SEQ ID NO: 88 - protein, 314 aa, Homo Sapiens [sequence omitted]

SEQ ID NO: 89 - DNA, 1136 bp, Homo Sapiens
  CDS (24)...(1136)
tgggatagcaataacctgtgaaaatgctcccccggctaatttgtatcaatgattatgaacaacatgctaaatcagtacttccaaagtctatatatgactattacaggtctggggcaaatgatgaagaaactttggctgataatattgcagcattttccagatggaagctgtatccaaggatgctccggaatgttgctgaaacagatctgtcgacttctgttttaggacagagggtcagcatgccaatatgtgtgggggctacggccatgcagcgcatggctcatgtggacggcgagcttgccactgtgagagcctgtcagtccctgggaacgggcatgatgttgagttcctgggccacctcctcaattgaagaagtggcggaagctggtcctgaggcacttcgttggctgcaactgtatatctacaaggaccgagaagtcaccaagaagctagtgcggcaggcagagaagatgggctacaaggccatatttgtgacagtggacacaccttacctgggcaaccgtctggatgatgtgcgtaacagattcaaactgccgccacaactcaggatgaaaaattttgaaaccagtactttatcattttctcctgaggaaaattttggagacgacagtggacttgctgcatatgtggctaaagcaatagacccatctatcagctgggaagatatcaaatggctgagaagactgacatcattgccaattgttgcaaagggcattttgagaggtgatgatgccagggaggctgttaaacatggcttgaatgggatcttggtgtcgaatcatggggctcgacaactcgatggggtgccagccactattgatgttctgccagaaattgtggaggctgtggaagggaaggtggaagtcttcctggacgggggtgtgcggaaaggcactgatgttctgaaagctctggctcttggcgccaaggctgtgtttgtggggagaccaatcgtttggggcttagctttccagggggagaaaggtgttcaagatgtcctcgagatactaaaggaagaattccggttggccatggctctgagtgggtgccagaatgtgaaagtcatcgacaagacattggtgaggaaaaatcctttggccgtttccaagatctga

SEQ ID NO: 90 - protein, 370 aa, Homo Sapiens
MLPRLICINDYEQHAKSVLPKSIYDYYRSGANDEETLADNIAAFSRWKLYPRMLRNVAETDLSTSVLGQRVSMPICVGATAMQRMAHVDGELATVRACQSLGTGMMLSSWATSSIEEVAEAGPEALRWLQLYIYKDREVTKKLVRQAEKMGYKAIFVTVDTPYLGNRLDDVRNRFKLPPQLRMKNFETSTLSFSPEENFGDDSGLAAYVAKAIDPSISWEDIKWLRRLTSLPIVAKGILRGDDAREAVKHGLNGILVSNHGARQLDGVPATIDVLPEIVEAVEGKVEVFLDGGVRKGTDVLKALALGAKAVFVGRPIVWGLAFQGEKGVQDVLEILKEEFRLAMALSGCQNVKVIDKTLVRKNPLAVSKI

SEQ ID NO: 91 - DNA, 1981 bp, Homo Sapiens
  CDS (62)...(1240)
cgaggagtttgaagctttcttaactcagaaagaaacttccaacacagtttcccaaagaaaaatgggcaccaagggcaaagttattaaatgcaaagcagccatcgcctgggaagcaggcaagcccctttgcattgaagaggttgaagtagctccccccaaggctcatgaagttcgcattcagatcattgctacctccctgtgccatactgatgccagtgttatcgattctaaatttgagggcctagctttcccagtgatcgttggccatgaggctgcaggtattgtggaaagtattgggccaggagtgaccaacgtcaaaccaggtgacaaagtaattccactttatgcacctctatgtagaaaatgcaagttttgtctgagtccactcacaaatttgtgtgggaaaatcagtaatctcaaaagtcctgctagtgatcaacaactaatggaagacaaaaccagcaggtttacctgcaaaggaaaaccagtttaccatttctttggaaccagtacattctctcagtacactgtggtgtcagatatcaatcttgccaaaatagatgatgatgcaaatttagagagagtttgtctgcttggatgtgggttttcaactggctatggggctgcaatcaacaatgccaaggtcacccctggttcgacttgtgctgtctttggcctaggaggtgtgggtctttctgctgtaatgggttgtaaagcagcaggagcttccagaatcataggtattgacatcaacagtgagaagtttgtgaaggctaaagccctgggagccactgactgcctcaatcctagagacttacataaaccgatccaggaagttatcattgaattgaccaagggaggtgtggattttgcccttgactgtgcaggtggatctgaaaccatgaaagcagccctggactgtacaaccgcaggctggggatcatgtactttcattggagtagctgctggtagcaaaggattgactatttttccagaggagctaataatcggccgtactataaatggaacattctttggtggttggaaaagtgtagattctatcccaaagctggtcactgactataagaataagaaattcaatctggatgcattggtgacccataccctgccttttgacaaaatcagtgaggcatttgacctaatgaaccaaggaaaaagcgtccgaacaatcctcatctttggaagatgccaggagcaattcagaatactatctgattgaatgtgaacctgcctggttaatttattacctgatttgatgaaccaaggaaagccatgagtttaaacaaatatttacatttaatatgggaacataaaagagctttaaatattatagactttgtacctgttatatatatgaatattccctatgttaaataataataataactagtgtttatgaatagaatcatatcatctttagaaattgtttaaaattagttctgggaagttgaaagtggggaatgaagagataataaataaaactagattggccatatgtttataatttttttagattgggtaatgaatacatggagtttcattatacttttctctccacgttttgtctatgttgaaaattttctgggagctaaatgatgagaacacatggacacatgatggggaacaacacacactggggcctgttgagggcagggagtcggcagagagagagcatcaggaagaatagctaatggatgctgggcttcatacctgggtgatgagatgatctgtgcagcaaagcaccatggtacatgtttacctatgtaacaaacctgcacatcctgcacatgtaccctggaacttaataaaagttggaaatttttaaaaagaatgaataagacctggtatttgatagcacaacagggagactatagtcaacagcaatttaattgtatattttaatatgactaaaagagtataatggattgtttgtaacacaaataaatgcttgaggagatgc

SEQ ID NO: 92 - protein, 392 aa, Homo Sapiens
MGTKGKVIKCKAAIAWEAGKPLCIEEVEVAPPKAHEVRIQIIATSLCHTDASVIDSKFEGLAFPVIVGHEAAGIVESIGPGVTNVKPGDKVIPLYAPLCRKCKFCLSPLTNLCGKISNLKSPASDQQLMEDKTSRFTCKGKPVYHFFGTSTFSQYTVVSDINLAKIDDDANLERVCLLGCGFSTGYGAAINNAKVTPGSTCAVFGLGGVGLSAVMGCKAAGASRIIGIDINSEKFVKAKALGATDCLNPRDLHKPIQEVIIELTKGGVDFALDCAGGSETMKAALDCTTAGWGSCTFIGVAAGSKGLTIFPEELIIGRTINGTFFGGWKSVDSIPKLVTDYKNKKFNLDALVTHTLPFDKISEAFDLMNQGKSVRTILIFGRCQEQFRILSD

SEQ ID NO: 93 - DNA, 1365 bp, Homo Sapiens
  CDS (106)...(1179)
agagtcgttgttttttctgattcttcttgctcctcatcctatttcctttgtcttaatttccccacaaagacaccctctccagagcccagcaattgtgagggactgatggagaagtatgtggctgctatggtgctgagtgcagctggagatgccctggggtactacaatgggaagtgggagttcctccaggatggggagaagatacaccggcagttggcccagctgggcggcttggatgccctagacgtgggaaggtggagagttagtgacgacacagtgatgcacttggccacagcagaagctcttgtggaagctgggaaagcccctaagttgactcaactgtattacctccttgctaagcattaccaagactgcatggaagacatggatgggcgggcaccaggtggtgcctcggtgcacaacgccatgcagctgaagccgggcaagcccaatggctggaggattcccttcaacagccatgagggcggctgtggggctgccatgcgggccatgtgcatcggtctcaggttcccacaccatagccaactggacacactgatccaagtgagcatcgagagtggtcggatgacccaccaccacccaacaggctacctgggggcccttgcgtctgctctttttacagcctatgctgtgaatagcagaccacccttgcagtggggaaaaggactgatggagctgctaccagaagctaaaaagtacattgtccaatcaggctactttgtagaggaaaatcttcaacactggtcctacttccaaaccaaatgggaaaattacctaaaacttagagggattttggatggagaatcagcccctaccttccctgagtctttcggtgtgaaggagagggatcagttctacacctccctgagctactctggctggggtggcagcagtgggcacgatgcccccatgattgcctacgatgctgttcttgctgcaggagactcctggaaggagcttgcccaccgagcctttttccatggtggagacagtgattctacagctgccattgctggctgctggtggggagttatgtatggttttaaaggagtgagtccctccaactatgagaaactagaatacagaaaccggctggaagagacagctagggctttatattctctcgggtcaaaagaagacactgtaatttccctttagggagacgtgatgttcacttctgatggattcttcttttgtgtatttccttttctgctatttcttttcagtttttccaaagtcaagagtcttaaccttgtactcagggaattttgagataacaagtcccttgggcaccttaagctcagttttttcaggctcatcctgttcttccagaatctatccctt

SEQ ID NO: 94 - protein, 357 aa, Homo Sapiens
MEKYVAAMVLSAAGDALGYYNGKWEFLQDGEKIHRQLAQLGGLDALDVGRWRVSDDTVMHLATAEALVEAGKAPKLTQLYYLLAKHYQDCMEDMDGRAPGGASVHNAMQLKPGKPNGWRIPFNSHEGGCGAAMRAMCIGLRFPHHSQLDTLIQVSIESGRMTHHHPTGYLGALASALFTAYAVNSRPPLQWGKGLMELLPEAKKYIVQSGYFVEENLQHWSYFQTKWENYLKLRGILDGESAPTFPESFGVKERDQFYTSLSYSGWGGSSGHDAPMIAYDAVLAAGDSWKELAHRAFFHGGDSDSTAAIAGCWWGVMYGFKGVSPSNYEKLEYRNRLEETARALYSLGSKEDTVISL

SEQ ID NO: 95 - DNA, 3425 bp, Homo Sapiens
  CDS (1)...(2619)
ggggagaggcggctgcggctgcggctgcggctgctggcggggggtgggggggaggaggaaccgggaagggggggcagggcgagcggagagctagctgtgttcctgaggcgcagccgccgcctagggcggtggggaggaggagggagccgcggggcttggcggggtcgggagggagggacgtgctgggggaacgagctggggaagacggagcgggctctgtgccgggcgggcgggcggcgggggggccagcgaccgcagccggggggacgcgggaggatggagcaagtggagatcctgaggaaattcatccagagggtccaggccatgaagagtcctgaccacaatggggaggacaacttcgcccgggacttcatgcggttaagaagattgtctaccaaatatagaacagaaaagatatatcccacagccactggagaaaaagaagaaaatgttaaaaagaacagatacaaggacatactgccatttgatcacagccgagttaaattgacattaaagactccttcacaagattcagactatatcaatgcaaattttataaagggcgtctatgggccaaaagcatatgtagcaactcaaggacctttagcaaatacagtaatagatttttggaggatgatatgggagtataatgttgtgatcattgtaatggcctgccgagaatttgagatgggaaggaaaaaatgtgagcgctattggcctttgtatggagaagaccccataacgtttgcaccatttaaaatttcttgtgaggatgaacaagcaagaacagactacttcatcaggacactcttacttgaatttcaaaatgaatctcgtaggctgtatcagtttcattatgtgaactggccagaccatgatgttccttcatcatttgattctattctggacatgataagcttaatgaggaaatatcaagaacatgaagatgttcctatttgtattcattgcagtgcaggctgtggaagaacaggtgccatttgtgccatagattatacgtggaatttactaaaagctgggaaaataccagaggaatttaatgtatttaatttaatacaagaaatgagaacacaaaggcattctgcagtacaaacaaaggagcaatatgaacttgttcatagagctattgcccaactgtttgaaaaacagctacaactatatgaaattcatggagctcagaaaattgctgatggagtgaatgaaattaacactgaaaacatgatcagctccatagagcctgaaaaacaagattctcctcctccaaaaccaccaaggacccgcagttgccttgttgaaggggatgctaaagaagaaatactgcagccaccggaacctcatccagtgccacccatcttgacaccttctcccccttcagcttttccaacagtcactactgtgtggcaggacaatgatagataccatccaaagccagtgttgcatatggtttcatcagaacaacattcagcagacctcaacagaaactatagtaaatcaacagaacttccagggaaaaatgaatcaacaattgaacagatagataaaaaattggaacgaaatttaagttttgagattaagaaggtccctctccaagagggaccaaaaagttttgatgggaacacacttttgaataggggacatgcaattaaaattaaatctgcttcaccttgtatagctgataaaatctctaagccacaggaattaagttcagatctaaatgtcggtgatacttcccagaattcttgtgtggactgcagtgtaacacaatcaaacaaagtttcagttactccaccagaagaatcccagaattcagacacacctccaaggccagaccgcttgcctcttgatgagaaaggacatgtaacgtggtcatttcatggacctgaaaatgccatacccatacctgatttatctgaaggcaattcctcagatatcaactatcaaactaggaaaactgtgagtttaacaccaagtcctacaacacaagttgaaacacctgatcttgtggatcatgataacacttcaccactcttcagaacacccctcagttttactaatccacttcactctgatgactcagactcagatgaaagaaactctgatggtgctgtgacccagaataaaactaatatttcaacagcaagtgccacagtttctgctgccactagtactgaaagcatttctactaggaaagtattgccaatgtccattgctagacataatatagcaggaacaacacattcaggtgctgaaaaagatgttgatgttagtgaagattcacctcctcccctacctgaaagaactcctgaatcgtttgtgttagcaagtgaacataatacacctgtaagatcggaatggagtgaacttcaaagtcaggaacgatctgaacaaaaaaagtctgaaggcttgataacctctgaaaatgagaaatgtgatcatccagcgggaggtattcactatgaaatgtgcatagaatgtccacctactttcagtgacaagagagaacaaatatcagaaaatccaacagaagccacagatattggttttggtaatcgatgtggaaaacccaaaggaccaagagatccaccttcagaatggacatgattcagggagctagaagacactttaagttatactggaaaattcaggtgccactgaaagccagatttatagtattccatctttaatatgtgggactaacagcagtgtagattgttaccttaatattttttgctgggaccatctacctgccttatactacacttaggaaaaagtattacatatggtttattttgaaacttcaagtattattgccttaatgtctcttaaccctgttacacgctgcttgtagacatgttaatatagtaatacctttatgatatattgagtttaaggactactctttttctgttttatcatgtatgcattattttgtatatgtacagggcaagtaggtatataatttgataaagttgcaattgaaatattattaacagaagatgtaagaaatttctgcatggtctaaatctttgtgtactttatttgtaaattatttgccctggagttttagaaaatagtttctgaattttaaacttgctggattcatgcagccagctttgcaggttatcagagatcaaagattgtaataataattttgtaaattgtaagcaaaaagttatttttatattatatacagtctaattgttcatcctaattgttcctgttttcatctagtcagagattcagtaagtgccttggaacaatattgaattctcttagcttgtgtgtgtttctttaatatttgaactcaagtgggattagaagactatcaaaatacatgtatgtttcaggatatttgacctgtcattaaaaaaaacaaacagttttacagtgccaaaaaaaaaaaaaaa

SEQ ID NO: 96 - protein, 872 aa, Homo Sapiens
GERRLRLRLRLLAGGGGEEEPGRGGRASGELAVFLRRSRRLGRWGGGGSRGAWRGREGGTCWGNELGKTERALCRAGGRRGGQRPQPGGRGRMEQVEILRKFIQRVQAMKSPDHNGEDNFARDFMRLRRLSTKYRTEKIYPTATGEKEENVKKNRYKDILPFDHSRVKLTLKTPSQDSDYINANFIKGVYGPKAYVATQGPLANTVIDFWRMIWEYNVVIIVMACREFEMGRKKCERYWPLYGEDPITFAPFKISCEDEQARTDYFIRTLLLEFQNESRRLYQFHYVNWPDHDVPSSFDSILDMISLMRKYQEHEDVPICIHCSAGCGRTGAICAIDYTWNLLKAGKIPEEFNVFNLIQEMRTQRHSAVQTKEQYELVHRAIAQLFEKQLQLYEIHGAQKIADGVNEINTENMISSIEPEKQDSPPPKPPRTRSCLVEGDAKEEILQPPEPHPVPPILTPSPPSAFPTVTTVWQDNDRYHPKPVLHMVSSEQHSADLNRNYSKSTELPGKNESTIEQIDKKLERNLSFEIKKVPLQEGPKSFDGNTLLNRGHAIKIKSASPCIADKISKPQELSSDLNVGDTSQNSCVDCSVTQSNKVSVTPPEESQNSDTPPRPDRLPLDEKGHVTWSFHGPENAIPIPDLSEGNSSDINYQTRKTVSLTPSPTTQVETPDLVDHDNTSPLFRTPLSFTNPLHSDDSDSDERNSDGAVTQNKTNISTASATVSAATSTESISTRKVLPMSIARHNIAGTTHSGAEKDVDVSEDSPPPLPERTPESFVLASEHNTPVRSEWSELQSQERSEQKKSEGLITSENEKCDHPAGGIHYEMCIECPPTFSDKREQISENPTEATDIGFGNRCGKPKGPRDPPSEWT

SEQ ID NO: 97 - DNA, 5355 bp, Homo Sapiens
  CDS (118)...(3987)
cagcggggagggcgggagccggctctcgggcggcggcgctgaagtttccttcccgccgcgctctcaccccgggctggcgccccgtgccatgcgggagcgctggggcggcggggcaacatgaagggcggcgacagggcttacacccgaggtccctctttggggtggctctttgctaagtgctgctgttgcttcccgtgtagagatgcatactctcattcctcaagcgagaatggaggcaagtccgagtccgtagccaacctgcaggcccagccctccctgaactccatccacagttccccgggtcccaagcgctccaccaacactcttaagaagtggctgacgagtcctgtgcgtcggctcaacagcgggaaggcagatggaaacatcaaaaagcagaagaaagttcgcgatggtcggaagagctttgacctgggatctcccaagcctggggatgaaacaacccctcagggagacagcgctgatgagaagagcaagaaaggttggggtgaagatgagccggatgaagagtcacacacacccctcccaccacctatgaagatttttgacaacgaccctacacaggatgaaatgtcctcctctttgctagcagcccggcaggcttccactgaagtacctactgctgcagaccttgtcaatgcaatagaaaagttggtcaaaaacaagctgagtctagaaggaagctcataccgggggagcttgaaagaccctgcaggctgcctgaatgaggggatggccccacccacacctcctaaaaatccagaagaagaacagaaagccaaggccctgagaggcaggatgtttgtcctgaatgagctggtacagacagagaaagactatgtcaaggatctgggcattgtggtggagggcttcatgaagagaatagaagaaaagggtgtccctgaggatatgcgaggaaaggacaaaatcgtgtttggaaatattcatcagatttatgactggcataaggattttttcctggcggaactggaaaagtgtatccaggagcaagacagattggcacagctctttattaagcacgagcggaagctgcacatctacgtgtggtattgtcagaataagccgcgctcagagtacatcgttgctgagtatgacgcctactttgaggaggtaaaacaggagataaatcagaggctgacactgagtgacttcctcatcaagcccattcagagaataacaaaataccagttgctcctcaaggacttcctgagatacagtgagaaggctggtttggagtgttcagatatcgagaaagcagtggagttaatgtgccttgttcccaaacgctgcaatgacatgatgaatctaggacgtctgcagggctttgagggcactctgactgctcaggggaagctgctgcagcaggacacattctatgtgatcgagctggatgcaggcatgcagtcccggaccaaagagaggcgcgtgttcctcttcgagcagattgtcatcttcagtgaactgctcaggaagggatccctcacccctggctacatgttcaaaaggagcatcaagatgaattacttggtcctggaggagaatgtggacaatgatccctgcaagtttgcactcatgaacagagagacttctgagagggttgttctgcaagccgccaacgctgacatccagcaggcctgggtgcaggacatcaatcaagtcttagaaacacagcgagactttttgaatgcactgcaatcgcccattgagtatcaacggaaagaaaggagcacagctgtgatgaggtctcaacctgccaggcttccccaagccagccccaggccctactcctctgttcctgcgggctcagagaagcccccaaagggctccagctataacccacctctgcctcccctgaagatatctacctccaatggcagtccagggtttgaataccaccagcctggggacaagttcgaagccagcaagcagaacgacctgggaggctgcaatgggacctcgtccatggccgtgatcaaagattactatgcactgaaggagaatgaaatctgtgtgagccaaggtgaggtggtccaggtcctcgccgtcaaccagcagaacatgtgtctggtgtaccagcctgccagcgaccattcccccgccgccgagggctgggtcccaggcagcatcctggcgcccctcaccaaagccacagcagcagaaagtagtgacgggagcatcaagaagtcatgttcatggcatactctacgcatgagaaagcgggcggaagtggagaacacgggtaaaaatgaagccacagggcctcgtaaacccaaggatattctgggcaacaaagtctctgttaaagagacgaacagttccgaggaatcagagtgtgatgatcttgaccctaatactagcatggggatcttaaatccaaatttcatccaagaagtggccccagaattccttgtgcccttggtggatgtgacctgcttgcttggggacacagtgatactgcagtgcaaagtctgtgggcggccaaagcccaccatcacttggaagggtccagaccagaacatccttgacactgataacagctcagccacatacacggtctcctcttgtgattctggagaaatcaccctgaagatctgtaatctgatgccccaagacagtgggatttatacctgcatagcaacaaatgaccacgggaccacatcaacgtctgcaacagtcaaagtgcaaggtgttccagcagcccctaaccgccccattgcccaggagagaagctgcacctccgtgattctccgctggctgcccccctccagcacaggaaactgcactatttctggttacactgtggagtacagagaggaaggttctcagatctggcagcagtcagtggcttcgaccttggacacttacctcgtcatcgaagaccttagtcccgggtgtccttatcagttcagagtcagtgccagtaacccctggggaatcagccttcccagtgagccctcggagtttgtgcgacttccagaatatgatgctgctgctgatggtgccaccatttcttggaaggaaaattttgactcagcttacactgagctgaatgaaattggaagaggccgtttctctatagtaaagaaatgcattcacaaagctacccgcaaagatgtggctgtgaaatttgttagcaaaaaaatgaagaagaaagaacaggctgcccacgaggctgccctgcttcagcacctacagcacccccagtacatcactctccatgacacctatgagtcccccacatcctacatcctgatcttggaactgatggatgatggccggctcttagactaccttatgaatcatgatgaactgatggaggaaaaagtagctttctatatccgagacatcatggaggctctgcagtaccttcacaactgcagggttgcacatttggacataaagcctgaaaacctgctcattgacctacggattccagtgcctcgagtgaagctcattgacttggaggatgctgtccagatctcgggtcacttccacattcaccacctgctggggaaccctgagtttgctgccccagaagtcattcaaggcatccccgtctccctggggacagacatctggagcatcggggttctgacatatgtcatgctgagtggggtctcccccttcttggatgagagcaaagaggagacatgtatcaacgtatgcagggtggatttcagcttcccccatgaatacttctgtggtgtgagcaatgctgccagagatttcatcaatgtgatcttacaggaagattttcggaggcggcccacagcagccacatgcttgcagcatccatggctgcagccccataatggcagctactctaagatccccctggacacctcccgcctagcatgcttcatagaacgtcgcaagcaccagaatgatgtgcggcctattcccaatgtcaagagctacattgtcaaccgggtgaaccaagggacgtagccatctcccagcccctatggtttcacatagacgtgcagtgtgaaccaaagcaagactgaatgtgactgtaaataattctgttcatcatttcactccgtgcagttctctgaattgagagatgtacctcttaaacctcgtcagtggttattcagggtctgagcagcagtaaaagtcaccctaaatcaaggggcttttcagaaggtcattctgaagaaataaagaggcaaagggtcacagaagtgttcagaagaagggcaaagataagaacaatattagctgttacgaaattttaactgtatcttccaaaatgagtggttaactgggcaaaccttaagctcacaagagtataaaagatctctggctttgctgaaattttaagcaagaagttctatttaatggagatgtcatgtatatcaactattctggtttagataacttagatatagtttcttgataggatagatacccacatacagtataatatatcccattcaggtttcagagtttttctaatatagagatatatatattaaatcaatcacaagtaattttgagtgctccagttaagacagtaatttatttaccgaatcattacattgttttgactaagcacaattagatgacaagtttttttagagcattttatagatcttgtatagaaatcttttaccagaacctgtgcattaagagaaagcaatgttgcccttttgaatgagaaaattttttctgtcaatcgcaggttatttgattaagataggttctttctgtatatgaaacgctccccgcaaattcactggcagctcagaattattctggaaagaaagcctgccaggaaataaattcaaatacagtatgagctgcggggatatttttgtgtctacaccaggtttgaaataagtaaacaaatacaagaggttcatataaaagggcaaatgaaaacctttcctacagttcctatgaacaacgtaccaacactttctgatttcttctacagctgtagaataccatctttcagaaagttggctggctttatttctaactccttattgaagctaaggggtgcttactaaaaggaggcagccatataggccttttaaaggcctggttctaagtcctttttaaagccatggaacaaaacctgatacatcaccctaacagagcattaagttgtaactgagattgcaatacctgtcaccatgcagccgctgatagttctctgaactaaaaggactaattgtactttgaggccaatgctgctttctggtgtatattctccatacaagattattattaactgctctttttccctctggtggaaaaaaaattaaacctgggcatttcatgggaaaaaaaaaaaaaaaaaaaaaa

SEQ ID NO: 98 - protein, 1289 aa, Homo Sapiens
MKGGDRAYTRGPSLGWLFAKCCCCFPCRDAYSHSSSENGGKSESVANLQAQPSLNSIHSSPGPKRSTNTLKKWLTSPVRRLNSGKADGNIKKQKKVRDGRKSFDLGSPKPGDETTPQGDSADEKSKKGWGEDEPDEESHTPLPPPMKIFDNDPTQDEMSSSLLAARQASTEVPTAADLVNAIEKLVKNKLSLEGSSYRGSLKDPAGCLNEGMAPPTPPKNPEEEQKAKALRGRMFVLNELVQTEKDYVKDLGIVVEGFMKRIEEKGVPEDMRGKDKIVFGNIHQIYDWHKDFFLAELEKCIQEQDRLAQLFIKHERKLHIYVWYCQNKPRSEYIVAEYDAYFEEVKQEINQRLTLSDFLIKPIQRITKYQLLLKDFLRYSEKAGLECSDIEKAVELMCLVPKRCNDMMNLGRLQGFEGTLTAQGKLLQQDTFYVIELDAGMQSRTKERRVFLFEQIVIFSELLRKGSLTPGYMFKRSIKMNYLVLEENVDNDPCKFALMNRETSERVVLQAANADIQQAWVQDINQVLETQRDFLNALQSPIEYQRKERSTAVMRSQPARLPQASPRPYSSVPAGSEKPPKGSSYNPPLPPLKISTSNGSPGFEYHQPGDKFEASKQNDLGGCNGTSSMAVIKDYYALKENEICVSQGEVVQVLAVNQQNMCLVYQPASDHSPAAEGWVPGSILAPLTKATAAESSDGSIKKSCSWHTLRMRKRAEVENTGKNEATGPRKPKDILGNKVSVKETNSSEESECDDLDPNTSMGILNPNFIQEVAPEFLVPLVDVTCLLGDTVILQCKVCGRPKPTITWKGPDQNILDTDNSSATYTVSSCDSGEITLKICNLMPQDSGIYTCIATNDHGTTSTSATVKVQGVPAAPNRPIAQERSCTSVILRWLPPSSTGNCTISGYTVEYREEGSQIWQQSVASTLDTYLVIEDLSPGCPYQFRVSASNPWGISLPSEPSEFVRLPEYDAAADGATISWKENFDSAYTELNEIGRGRFSIVKKCIHKATRKDVAVKFVSKKMKKKEQAAHEAALLQHLQHPQYITLHDTYESPTSYILILELMDDGRLLDYLMNHDELMEEKVAFYIRDIMEALQYLHNCRVAHLDIKPENLLIDLRIPVPRVKLIDLEDAVQISGHFHIHHLLGNPEFAAPEVIQGIPVSLGTDIWSIGVLTYVMLSGVSPFLDESKEETCINVCRVDFSFPHEYFCGVSNAARDFINVILQEDFRRRPTAATCLQHPWLQPHNGSYSKIPLDTSRLACFIERRKHQNDVRPIPNVKSYIVNRVNQGT

SEQ ID NO: 99 - DNA, 2160 bp, Homo Sapiens
  CDS (52)...(2154)
gaccagaccggcccccccgagactatagccttcactttccctcggtccaccatggagcccttgtgtccactcctgctggtgggttttagcttgccgctcgccagggctctcaggggcaacgagaccactgccgacagcaacgagacaaccacgacctcaggccctccggacccgggcgcctcccagccgctgctggcctggctgctactgccgctgctgctcctcctcctcgtgctccttctcgccgcctacttcttcaggttcaggaagcagaggaaagctgtggtcagcaccagcgacaagaagatgcccaacggaatcttggaggagcaagagcagcaaagggtgatgctgctcagcaggtcaccctcagggcccaagaagtattttcccatccccgtggagcacctggaggaggagatccgtatcagatccgccgacgactgcaagcagtttcgggaggagttcaactcattgccatctggacacatacaaggaacttttgaactggcaaataaagaagaaaacagagaaaaaaacagatatcccaacatccttcccaatgaccattctagggtgattctgagccaactggatggaattccctgttcagactacatcaatgcttcctacatagatggttacaaagagaagaataaattcatagcagctcaaggtcccaaacaggaaacggttaacgacttctggagaatggtctgggagcaaaagtctgcgaccatcgtcatgttaacaaacttgaaagaaaggaaagaggaaaagtgccatcagtactggcccgaccaaggctgctggacctatggaaacatccgggtgtgcgtggaggactgcgtggttttggtcgactacaccatccggaagttctgcatacagccacagctccccgacggctgcaaagcccccaggctggtctcacagctgcacttcaccagctggcccgacttcggagtgccttttacccccattgggatgctgaagttcctcaagaaagtaaagacgctcaaccccgtgcacgctgggcccatcgtggtccactgtagcgcgggcgtgggccggacgggcaccttcattgtgatcgatgccatgatggccatgatgcacgcggagcagaaggtggatgtgtttgaatttgtgtctcgaatccgtaatcagcgccctcagatggttcaaacggatatgcagtacacgttcatctaccaagccttactcgagtactacctctacggggacacagagctggacgtgtcctccctggagaagcacctgcagaccatgcacggcaccaccacccacttcgacaagatcgggctggaggaggagttcaggaaattgacaaatgtccggatcatgaaggagaacatgaggacgggcaacttgccggcaaacatgaagaaggccagggtcatccagatcatcccgtatgacttcaaccgagtgatcctttccatgaaaaggggtcaagaatacacagactacatcaacgcatccttcatagacggctaccgacagaaggactatttcatcgccacccaggggccactggcacacacggttgaggacttctggaggatgatctgggaatggaaatcccacactatcgtgatgctgacggaggtgcaggagagagagcaggataaatgctaccagtattggccaaccgagggctcagttactcatggagaaataacgattgagataaagaatgataccctttcagaagccatcagtatacgagactttctggtcactctcaatcagccccaggcccgccaggaggagcaggtccgagtagtgcgccagtttcacttccacggctggcctgagatcgggattcccgccgagggcaaaggcatgattgacctcatcgcagccgtgcagaagcagcagcagcagacaggcaaccaccccatcaccgtgcactgcagtgccggagctgggcgaacaggtacattcatagccctcagcaacattttggagcgagtaaaagccgagggacttttagatgtatttcaagctgtgaagagtttacgacttcagagaccacatatggtgcaaaccctggaacagtatgaattctgctacaaagtggtacaagattttattgatatattttctgattatgctaatttcaaatgaagattc

SEQ ID NO: 100 - protein, 700 aa, Homo Sapiens
MEPLCPLLLVGFSLPLARALRGNETTADSNETTTTSGPPDPGASQPLLAWLLLPLLLLLLVLLLAAYFFRFRKQRKAVVSTSDKKMPNGILEEQEQQRVMLLSRSPSGPKKYFPIPVEHLEEEIRIRSADDCKQFREEFNSLPSGHIQGTFELANKEENREKNRYPNILPNDHSRVILSQLDGIPCSDYINASYIDGYKEKNKFIAAQGPKQETVNDFWRMVWEQKSATIVMLTNLKERKEEKCHQYWPDQGCWTYGNIRVCVEDCVVLVDYTIRKFCIQPQLPDGCKAPRLVSQLHFTSWPDFGVPFTPIGMLKFLKKVKTLNPVHAGPIVVHCSAGVGRTGTFIVIDAMMAMMHAEQKVDVFEFVSRIRNQRPQMVQTDMQYTFIYQALLEYYLYGDTELDVSSLEKHLQTMHGTTTHFDKIGLEEEFRKLTNVRIMKENMRTGNLPANMKKARVIQIIPYDFNRVILSMKRGQEYTDYINASFIDGYRQKDYFIATQGPLAHTVEDFWRMIWEWKSHTIVMLTEVQEREQDKCYQYWPTEGSVTHGEITIEIKNDTLSEAISIRDFLVTLNQPQARQEEQVRVVRQFHFHGWPEIGIPAEGKGMIDLIAAVQKQQQQTGNHPITVHCSAGAGRTGTFIALSNILERVKAEGLLDVFQAVKSLRLQRPHMVQTLEQYEFCYKVVQDFIDIFSDYANFK

SEQ ID NO: 101 - DNA, 3331 bp, Homo Sapiens
  CDS (161)...(2812)
agggattcttctgcctccacttcaggttttagcagcttggtgctaaattgctgtctcaaaatgcagaggatctaatttgcagaggaaaacagccaaagaaggaagaggaggaaaaggaaaaaaaaaggggtatattgtggatgctctacttttcttggaaatgcaaaagattatgcatatttctgtcctcctttctcctgttttatggggactgatttttggtgtctcttctaacagcatacagataggggggctatttcctaggggcgccgatcaagaatacagtgcatttcgagtagggatggttcagttttccacttcggagttcagactgacaccccacatcgacaatttggaggtggcaaacagcttcgcagtcactaatgctttctgctcccagttttcgagaggagtctatgctatttttggattttatgacaagaagtctgtaaataccatcacatcattttgcggaacactccacgtctccttcatcactcccagcttcccaacagatggcacacatccatttgtcattcagatgagacccgacctcaaaggagctctccttagcttgattgaatactatcaatgggacaagtttgcatacctctatgacagtgacagaggcttatcaacactgcaagctgtgctggattctgctgctgaaaagaaatggcaagtgactgctatcaatgtgggaaacattaacaatgacaagaaagatgagatgtaccgatcactttttcaagatctggagttaaaaaaggaacggcgtgtaattctggactgtgaaagggataaagtaaacgacattgtagaccaggttattaccattggaaaacacgttaaagggtaccactacatcattgcaaatctggaatttactgatggagacctattaaaaatccagtttggaggtgcaaatgtctctggatttcagatagtggactatgatgattcgttggtatctaaatttatagaaagatggtcaacactggaagaaaaagaataccctggagctcacacaacaacaattaagtatacttctgctctgacctatgatgccgttcaagtgatgactgaagccttccgcaacctaaggaagcaaagaattgaaatctcccgaagggggaatgcaggagactgtctggcaaacccagcagtgccctggggacaaggtgtagaaatagaaagggccctcaaacaggttcaggttgaaggtctctcaggaaatataaagtttgaccagaatggaaaaagaataaactatacaattaacatcatggagctcaaaactaatgggccccggaagattggctactggagtgaagtggacaaaatggttgttacccttactgagctcccttctggaaatgacacctctgggcttgagaataagactgttgttgtcaccacaattttggaatctccgtatgttatgatgaagaaaaatcatgaaatgcttgaaggcaatgagcgctatgagggctactgtgttgacctggctgcagaaatcgccaaacattgtgggttcaagtacaagttgacaattgttggtgatggcaagtatggggccagggatgcagacacgaaaatttggaatgggatggttggagaacttgtatatgggaaagctgatattgcaattgctccattaactattacccttgtgagagaagaggtgattgacttctcaaagcccttcatgagcctcgggatatctatcatgatcaagaagcctcagaagtccaaaccaggagtgttttcctttcttgatcctttagcctatgagatctggatgtgcattgtttttgcctacattggggtcagtgtagttttattcctggtcagcagatttagcccctacgagtggcacactgaggagtttgaagatggaagagaaacacaaagtagtgaatcaactaatgaatttgggatttttaatagtctctggttttccttgggtgcctttatgcggcaaggatgcgatatttcgccaagatccctctctgggcgcattgttggaggtgtgtggtggttctttaccctgatcataatctcctcctacacggctaacttagctgccttcctgactgtagagaggatggtgtctcccatcgaaagtgctgaggatctttctaagcaaacagaaattgcttatggaacattagactctggctccactaaagagtttttcaggagatctaaaattgcagtgtttgataaaatgtggacctacatgcggagtgcggagccctctgtgtttgtgaggactacggccgaaggggtggctagagtgcggaagtccaaagggaaatatgcctacttgttggagtccacgatgaacgagtacattgagcaaaggaagccttgcgacaccatgaaagttggtggaaacctggattccaaaggctatggcatcgcaacacctaaaggatcctcattaggaaccccagtaaatcttgcagtattgaaactcagtgagcaaggcgtcttagacaagctgaaaaacaaatggtggtacgataaaggtgaatgtggagccaaggactctggaagtaaggaaaagaccagtgccctcagtctgagcaacgttgctggagtattctacatccttgtcgggggccttggtttggcaatgctggtggctttgattgagttctgttacaagtcaagggccgaggcgaaacgaatgaaggtggcaaagaatgcacagaatattaacccatcttcctcgcagaattcacagaattttgcaacttataaggaaggttacaacgtatatggcatcgaaagtgttaaaatttaggggatgaccttgaatgatgccatgaggaacaaggcaaggctgtcaattacaggaagtactggagaaaatggacgtgttatgactccagaatttcccaaagcagtgcatgctgtcccttacgtgagtcctggcatgggaatgaatgtcagtgtgactgatctctcgtgattgataagaaccttttgagtgccttacacaatggttttcttgtgtgtttattgtcaaagtggtgagaggcatccagtatcttgaagacttttctttcagccaagaattcttaaatatgtggagttcatcttgaattgtaaggaatgattaattaaaacacaacatctttttctactcgagttacagacaaagcgtggtggacatgcacagctaacatggaagtactataatttacctgaagtctttgtacagacaacaaacctgtttctgcagccactattgttagtctcttgattcataatgacttaagcacacttgacatcaactgcatcaagatgtgacatgttttat

SEQ ID NO: 102 - protein, 883 aa, Homo Sapiens
MQKIMHISVLLSPVLWGLIFGVSSNSIQIGGLFPRGADQEYSAFRVGMVQFSTSEFRLTPHIDNLEVANSFAVTNAFCSQFSRGVYAIFGFYDKKSVNTITSFCGTLHVSFITPSFPTDGTHPFVIQMRPDLKGALLSLIEYYQWDKFAYLYDSDRGLSTLQAVLDSAAEKKWQVTAINVGNINNDKKDEMYRSLFQDLELKKERRVILDCERDKVNDIVDQVITIGKHVKGYHYIIANLEFTDGDLLKIQFGGANVSGFQIVDYDDSLVSKFIERWSTLEEKEYPGAHTTTIKYTSALTYDAVQVMTEAFRNLRKQRIEISRRGNAGDCLANPAVPWGQGVEIERALKQVQVEGLSGNIKFDQNGKRINYTINIMELKTNGPRKIGYWSEVDKMVVTLTELPSGNDTSGLENKTVVVTTILESPYVMMKKNHEMLEGNERYEGYCVDLAAEIAKHCGFKYKLTIVGDGKYGARDADTKIWNGMVGELVYGKADIAIAPLTITLVREEVIDFSKPFMSLGISIMIKKPQKSKPGVFSFLDPLAYEIWMCIVFAYIGVSVVLFLVSRFSPYEWHTEEFEDGRETQSSESTNEFGIFNSLWFSLGAFMRQGCDISPRSLSGRIVGGVWWFFTLIIISSYTANLAAFLTVERMVSPIESAEDLSKQTEIAYGTLDSGSTKEFFRRSKIAVFDKMWTYMRSAEPSVFVRTTAEGVARVRKSKGKYAYLLESTMNEYIEQRKPCDTMKVGGNLDSKGYGIATPKGSSLGTPVNLAVLKLSEQGVLDKLKNKWWYDKGECGAKDSGSKEKTSALSLSNVAGVFYILVGGLGLAMLVALIEFCYKSRAEAKRMKVAKNAQNINPSSSQNSQNFATYKEGYNVYGIESVKI

SEQ ID NO: 103 - DNA, 1830 bp, Homo Sapiens
  CDS (449)...(1786)
atcttccggtcgtgggccatgccgggggcgggcccggaaccgccacgggtgagtcgggtcgtggctgctgccgggtcctgcgcgctccggactgaggtggcgtccctgggccggacggcggtgtcccggcgtggcgggaagccggcactggagcgggagcgcactgggcgcgggaccgggaggcgcagggaccggacggctcccgagtcgcccacctgacggtaccgagagggcggcgcccctccgagcagagccgtcccggccactcccctgggatctgacttggctcttgcggtcgcgggcaccgtgaagccctggggtgtgcgtggctcctcctgctagaagaagtcttcacttcccaggagagccaaagcgtgtctggccctaggtgggaaaagaactggctgtgacctttgccctgacctggaagggcccagccttgggctgaatggcagcacccacgcccgcccgtccggtgctgacccacctgctggtggctctcttcggcatgggctcctgggctgcggtcaatgggatctgggtggagctacctgtggtggtcaaagagcttccagagggttggagcctcccctcttacgtctctgtgcttgtggctctggggaacctgggtctgctggtggtgaccctctggaggaggctggccccaggaaaggacgagcaggtccccatccgggtggtgcaggtgctgggcatggtgggcacagccctgctggcctctctgtggcaccatgtggccccagtggcaggacagttgcattctgtggccttcttagcactggcctttgtgctggcactggcatgctgtgcctcgaatgtcactttcctgcccttcttgagccacctgccacctcgcttcttacggtcattcttcctgggtcaaggcctgagtgccctgctgccctgcgtgctggccctagtgcagggtgtgggccgcctcgagtgcccgccagcccccatcaacggcacccctggccccccgctcgacttccttgagcgttttcccgccagcaccttcttctgggcactgactgcccttctggtcgcttcagctgctgccttccagggtcttctgctgctgttgccgccaccaccatctgtacccacaggggagttaggatcaggcctccaggtgggagccccaggagcagaggaagaggtggaagagtcctcaccactgcaagagccaccaagccaggcagcaggcaccacccctggtccagaccctaaggcctatcagcttctatcagcccgcagtgcctgcctgctgggcctgttggccgccaccaacgcgctgaccaatggcgtgctgcctgccgtgcagagcttttcctgcttaccctacgggcgtctggcctaccacctggctgtggtgctgggcagtgctgccaatcccctggcctgcttcctggccatgggtgtgctgtgcaggtccttggcagggctgggcggcctctctctgctgggcgtgttctgtgggggctacctgatggcgctggcagtcctgagcccctgcccgcccctggtgggcacctcggcgggggtcgtcctcgtggtgctgtcgtgggtgctgtgtcttggcgtgttctcctacgtgaaggtggcagccagctccctgctgcatggcgggggccggccggcattgctggcagccggcgtggccatccaggtgggctctctgctcggcgctgttgctatgttccccccgaccagcatctatcacgtgttccacagcagaaaggactgtgcagacccctgtgactcctgagcctgggacctacatgtggtttgcgtaataaaacatttgtattt

SEQ ID NO: 104 - protein, 445 aa, Homo Sapiens
MAAPTPARPVLTHLLVALFGMGSWAAVNGIWVELPVVVKELPEGWSLPSYVSVLVALGNLGLLVVTLWRRLAPGKDEQVPIRVVQVLGMVGTALLASLWHHVAPVAGQLHSVAFLALAFVLALACCASNVTFLPFLSHLPPRFLRSFFLGQGLSALLPCVLALVQGVGRLECPPAPINGTPGPPLDFLERFPASTFFWALTALLVASAAAFQGLLLLLPPPPSVPTGELGSGLQVGAPGAEEEVEESSPLQEPPSQAAGTTPGPDPKAYQLLSARSACLLGLLAATNALTNGVLPAVQSFSCLPYGRLAYHLAVVLGSAANPLACFLAMGVLCRSLAGLGGLSLLGVFCGGYLMALAVLSPCPPLVGTSAGVVLVVLSWVLCLGVFSYVKVAASSLLHGGGRPALLAAGVAIQVGSLLGAVAMFPPTSIYHVFHSRKDCADPCDS

SEQ ID NO: 105 - DNA, 2763 bp, Homo Sapiens
  CDS (367)...(1770)
ggatcccagtggcccggcgtgctcggctcccacaggcctgcagccagcatcgcaccgaaccttcggggggccgcggctggagcgctcggccggcgtgggagcgcaaggccgcagatgcaatcttcttaccgcgaagaagccaggggaataggtagccacatcttgtttgcagataagaaaggaagctaacgcagtatctgcaaagccaggagtctgactcagtacttttctcactcatgcatacaagcagctaaaaatgacacagcttatttaccatgcccctgacactgcactgagcactttatgagcttgaactctgttaatctcacgaccacctcatgagactctccagaaagagcaacagtaatggagtacatgagcactggaagtgacaataaagaagagattgatttattaattaaacatttaaatgtgtctgatgtaatagacattatggaaaatctttatgcaagtgaagagccagcagtttatgaacccagtctaatgaccatgtgtcaagacagtaatcaaaacgatgagcgttctaagtctctgctgcttagtggccaagaggtaccatggttgtcatcagtcagatatggaactgtggaggatttgcttgcttttgcaaaccatatatccaacactgcaaagcatttttatggacaacgaccacaggaatctggaattttattaaacatggtcatcactccccaaaatggacgttaccaaatagattccgatgttctcctgatcccctggaagctgacttacaggaatattggttctgattttattcctcggggcgcctttggaaaggtatacttggctcaagatataaagacgaagaaaagaatggcgtgtaaactgatcccagtagatcaatttaagccatctgatgtggaaattcaggcttgcttccggcacgagaacatcgcagagctgtatggcgcagtcctgtggggtgaaactgtccatctctttatggaagcaggcgagggagggtctgttctggagaaactggagagctgtggaccaatgagagaatttgaaattatttgggtgacaaagcatgttctcaagggacttgattttctacactcaaagaaagtgatccatcatgatattaaacctagcaacattgttttcatgtccacaaaagctgttttggtggattttggcctaagtgttcaaatgaccgaagatgtctattttcctaaggacctccgaggaacagagatttacatgagcccagaggtcatcctgtgcaggggccattcaaccaaagcagacatctacagcctgggggccacgctcatccacatgcagacgggcaccccaccctgggtgaagcgctaccctcgctcagcctatccctcctacctgtacataatccacaagcaagcacctccactggaagacattgcagatgactgcagtccagggatgagagagctgatagaagcttccctggagagaaaccccaatcaccgcccaagagccgcagacctactaaaacatgaggccctgaacccgcccagagaggatcagccacgctgtacgagtctggactctgccctcttggagcgcaagaggctgctgagtaggaaggagctggaacttcctgagaacattgctgattcttcgtgcacaggaagcaccgaggaatctgagatgctcaagaggcaacgctctctctacatcgacctcggcgctctggctggctacttcaatcttgttcggggaccaccaacgcttgaatatggctgaaggatgccatgtttgcctctaaattaagacagcattgatctcctggaggctggttctgctgcctctacacaggggcccgttacagtgaatggtgccattttcgaaggagcagtgtgacctcctgtgacccatgaatgtgcctccaagcggccctgtgtgtttgacatgtgaagctatttgatatgcaccaggtctcaaggttctcatttctcaggtgacgtgattctaaggcaggaatttgagagttcacagaaggatcgtgtctgctgactgtttcattcactgtgcactttgctcaaaattttaaaaataccaatcacaaggataatagagtagcctaaaattactattcttggttcttatttaagtatggaatattcattttactcagaatagcctgttttgtgtatattggtgtatattatataactctttgagcctttattggtaaattctggtatacattgaattcattataatttgggtgactagaacaacttgaagattgtagcaataagctggactagtgtcctaaaaatggctaactgatgaattagaagccatctgacagacggccactagtgacagtttcttttgtgttcctatggaaacattttatactgtacatgctatgctgaagacattcaaaacgtgatgttttgaatgtggataaaactgtgtaaaccacataattttgtacatccaaggatgaggtgtgacctttaagaaaaatgaaaacttttgtaaattattgatgattttgtaattcttatgactaaattttcttttaagcatttgtatattaaaatagcatactgtgtatgttttatatcaaatgccttcatgaatctttcatacatatatatatttgtaacatgtaaagtatgtgagtagtcttatgtaaagtatgtttttacattatgcaaataaaacccaatacttttgtccaatgtggttggtcaaatcaactgaataaattcagtattttgcctt

SEQ ID NO: 106 - protein, 467 aa, Homo Sapiens [sequence omitted]

SEQ ID NO: 107 - DNA, 2811 bp, Homo Sapiens
  CDS (1)...(1440)
atgagcgatgttaccattgtgaaagaaggttgggttcagaagaggggagaatatataaaaaactggaggccaagatacttccttttgaagacagatggctcattcataggatataaagagaaacctcaagatgtggatttaccttatcccctcaacaacttttcagtggcaaaatgccagttaatgaaaacagaacgaccaaagccaaacacatttataatcagatgtctccagtggactactgttatagagagaacatttcatgtagatactccagaggaaagggaagaatggacagaagctatccaggctgtagcagacagactgcagaggcaagaagaggagagaatgaattgtagtccaacttcacaaattgataatataggagaggaagagatggatgcctctacaacccatcataaaagaaagacaatgaatgattttgactatttgaaactactaggtaaaggcacttttgggaaagttattttggttcgagagaaggcaagtggaaaatactatgctatgaagattctgaagaaagaagtcattattgcaaaggatgaagtggcacacactctaactgaaagcagagtattaaagaacactagacatccctttttaacatccttgaaatattccttccagacaaaagaccgtttgtgttttgtgatggaatatgttaatgggggcgagctgtttttccatttgtcgagagagcgggtgttctctgaggaccgcacacgtttctatggtgcagaaattgtctctgccttggactatctacattccggaaagattgtgtaccgtgatctcaagttggagaatctaatgctggacaaagatggccacataaaaattacagattttggactttgcaaagaagggatcacagatgcagccaccatgaagacattctgtggcactccagaatatctggcaccagaggtgttagaagataatgactatggccgagcagtagactggtggggcctaggggttgtcatgtatgaaatgatgtgtgggaggttacctttctacaaccaggaccatgagaaactttttgaattaatattaatggaagacattaaatttcctcgaacactctcttcagatgcaaaatcattgctttcagggctcttgataaaggatccaaataaacgccttggtggaggaccagatgatgcaaaagaaattatgagacacagtttcttctctggagtaaactggcaagatgtatatgataaaaagcttgtacctccttttaaacctcaagtaacatctgagacagatactagatattttgatgaagaatttacagctcagactattacaataacaccacctgaaaaatatgatgaggatggtatggactgcatggacaatgagaggcggccgcatttccctcaattttcctactctgcaagtggacgagaataagtctctttcattctgctacttcactgtcatcttcaatttattactgaaaatgattcctggacatcaccagtcctagctcttacacatagcaggggcaccttccgacatcccagaccagccaagggtcctcacccctcgccacctttcaccctcatgaaaacacacatacacgcaaatacactccagtttttgtttttgcatgaaattgtatctcagtctaaggtctcatgctgttgctgctactgtcttactattatagcaactttaagaagtaattttccaacctttggaagtcatgagcccaccattgttcatttgtgcaccaattatcatcttttgatcttttagtttttccctcagtgaaggctaaatgagatacactgattctaggtacattttttaactttctagaagagaaaaactaactagactaagaagatttagtttataaattcagaacaagcaattgtggaagggtggtggcgtgcatatgtaaagcacatcagatccgtgcgtgaagtaggcatatatcactaagctgtggctggaattgattaggaagcatttggtagaaggactgaacaactgttgggatatatatatatatatataattttttttttttaaattcctggtggatactgtagaagaagcccatatcacatgtggatgtcgagacttcacgggcaatcatgagcaagtgaacactgttctaccaagaactgaaggcatatgcacagtcaaggtcacttaaagggtcttatgaaacaatttgagccagagagcatctttcccctgtgcttggaaaccttttttccttcttgacatttatcacctctgatggctgaagaatgtagacaggtataatgatactgcttttcaccaaaatttctacaccaaggtaaacaggtgtttgccttatttaattttttactttcagttctacgtgaattagctttttctcagatgttgaaactttgaatgtccttttatgattttgtttatattgcagtagtatttattttttagtgatgagaattgtatgtcatgttagcaaacgcagctccaacttatataaaatagacttactgcagttacttttgacccatgtgcaaggattgtacacgctgatgagaatcatgcactttttctcctctgttaaaaaaaatgataaggctctgaaatggaatatattggttagaatttggctttgggagaagagatgctgccatttaaccccttggtactgaaaatgagaaaatccccaactatgcatgccaaggggttaatgaaacaaatagctgttgacgtttgctcatttaagaatttgaaacgttatgatgacctggcaacaaaaaaaaaaaaaaaaaa

SEQ ID NO: 108 - protein, 479 aa, Homo Sapiens
MSDVTIVKEGWVQKRGEYIKNWRPRYFLLKTDGSFIGYKEKPQDVDLPYPLNNFSVAKCQLMKTERPKPNTFIIRCLQWTTVIERTFHVDTPEEREEWTEAIQAVADRLQRQEEERMNCSPTSQIDNIGEEEMDASTTHHKRKTMNDFDYLKLLGKGTFGKVILVREKASGKYYAMKILKKEVIIAKDEVAHTLTESRVLKNTRHPFLTSLKYSFQTKDRLCFVMEYVNGGELFFHLSRERVFSEDRTRFYGAEIVSALDYLHSGKIVYRDLKLENLMLDKDGHIKITDFGLCKEGITDAATMKTFCGTPEYLAPEVLEDNDYGRAVDWWGLGVVMYEMMCGRLPFYNQDHEKLFELILMEDIKFPRTLSSDAKSLLSGLLIKDPNKRLGGGPDDAKEIMRHSFFSGVNWQDVYDKKLVPPFKPQVTSETDTRYFDEEFTAQTITITPPEKYDEDGMDCMDNERRPHFPQFSYSASGRE

SEQ ID NO: 109 - DNA, 3941 bp, Homo Sapiens
  CDS (213)...(1748)
  misc_feature (1)...(3941): n = A,T,C or G
ttgggaaacccctacctgtctgtacctgtaggtcttttctctggggtctggaagaagaatccttcaatatcttgccttctggtaatctgagagcagggcgagaaaaggaagatcagagttccacccttaaatctgtaggttttcactcccccactctcctttgcagtcccgtggagtctccatctgagccctttcctagtccaggcatcccgatgttggtggatggcccatctgagcggccagccctgtgcttcttgctgttggctgtggcaatgtctttcttcggctcagctctatccatagatgaaacacgggcgcatctgttgttgaaagaaaagatgatgcggctcggggggcggctggtgctgaacaccaaggaggagctggccaatgagaggctcatgacgctcaaaatcgctgagatgaaggaggccatgaggaccctgatattcccacccagcatgcactttttccaggccaagcatctcattgagagaagtcaagtgtttaatattctaaggatgatgccaaaaggggctgccttgcacctccatgacattggcatcgtgactatggactggctggtgaggaatgtcacctacaggcctcactgccacatctgtttcaccccaagggggatcatgcagttcagatttgctcacccaactccccgtccatcagaaaaatgttccaagtggattctgctggaggattatcggaagcgggtgcagaacgtcactgagtttgatgacagcttgctgaggaatttcactctggtgacccagcacccggaggtgatttacacaaaccaaaatgttgtctggtcgaaatttgaaaccatcttcttcaccatctctggtctcatccattacgcaccagtgttcagagactatgtcttccggagcatgcaggagttctacgaggacaacgtgctctacatggagatcagagccaggctgctgccggtgtatgagctcagtggagagcaccatgacgaagagtggtcagtgaagacttaccaggaagtagctcagaagtttgtggaaactcaccctgagtttattggaatcaaaatcatttattcggatcacagatccaaagatgtggctgtcatcgcagaatccatccgaatggccatggggctccgaatcaagttccccacggtggtggcagggtttgacctggtggggcatgaggacactggccactccttgcgtgactacaaggaagctctgatgatccccgccaaggatggcgttaagctgccttacttcttccacgccggagaaacagactggcagggtacttccatagacaggaacattctggatgctctgatgctgaacactaccagaatcggccatggatttgctttgagcaaacaccccgcagtcaggacttactcctggaaaaaggacatccccatagaagtctgtcccatctctaaccaggtgctgaaactggtgtctgacttgaggaaccaccctgtagccactctgatggccactgggcaccccatggtgatcagctctgatgacccagctatgtttggtgccaaaggcttgtcctatgatttctatgaggtcttcatgggcattggggggatgaaggctgacctgaggaccctcaaacagctggccatgaactctatcaagtacagtaccctgttggagagtgagaaaaatactttcatggaaatctggaagaagagatgggataagttcatagcagatgtggctacaaagtgaggagaagctagccagccctctacaagctgtcttcttgcacacgctgtcacttcctctcactcgttcttgaatcagctccatgtgcccatgaaatcaatggcctctgtatggagcgaccctgtgagaagcacttggctggctgagcaaattcatcctctggaaatattctctctcagccacagtgacattgaccctcttggttttctcctctctctggccatttcttccagtttccctatttcagagtcttctcctctctctgatctctgtgctgtttcctcaggactcagtcctgggctctcttctattctggtctctttatttttttatttttgtattttttcgagatggagttttgctcttgttgcccaggctggagtacaatggtgcgatctcagctcagtgcaacctccgccacccgggttcaggcaattctcttgcatcagcctcccgagtagttggaattataggcatgtgccaccacacccagctgatttttgcatttttagtagagacaggttttcaccatgttggcgagctggtatccaactcttgacctcaggtgatccactcgccccttggctcccaaagtgctggaattacaggcgttagccaccatgcctggcctattctggtctctttaactctctcctctttatttctcttctctctctgtacacttttcctgggtggtctcatccattcctttgctttttcataccatttatttgttaatgattcccacatttatttatgcacttggagagctcacaggaatctcagaaactgatgaggtacaattctgaaccctcagtctcttccctttaaacctttctttttctctactttaatttttctaaagagtgtcttgctatgttgcccaggctggtctccaactcaagtgatcctcctgccgcagtctcccgaagtgctgggattactgacatgagccaccacactcagccctttaaacctttccctggcctttcccatagctggtgaaggacacctccatccattccacgcagttgctcaaagcagaaattttcagtgcaagtcttgatgctgcgccgtcccccactccctacatcagaacgcatccctcatctggactccagcggtggcttcttgatgctgcgcggtcccccactccctacatcagaatgcatcccgcatccagactccagcggtggtgctctacctgcacgctgttgccaagtccaagctaccatactcctgcctgagctatgacaacagcctcctcactgatctcccctttcttccctttgcctcctccagctcatttttcacagtgtagaatgacattttgtttgtttgttttgttttgtttgagatggagtctcgttctgttgcccagggtggagtgcagcggtgcgatctcggctcactgcaacttccactcccgggttcaagcggattctcgtgcctcagcctcctgagtagctgggattacaggcatgcaccaccatgcccggataatttttgtatttttagtagagatggggtttcactatgttggccaggctggtctcgaacacctgacttcgtggtccacccgccttcggcctcccaaagcactgggattacaggcgtgagccacccggcctggcctagaatgacttttaaaagatcaaattaaatcaggtcactcctttgcttacaacgcagtgcgtttagaggtacaccccatgtctccacagggcatacagcatccgatttaatctggatccattccggcgcttcctctcccagtcacccagagggccccaaccccggcggccctttcttcctcaaatgtcctcggctctataccgtgcctgggtcttttctctttctctctgcctggaacattccttctttccccttttgtcttgcccactcctgtttacccttcaagtttcaagttcatgtcactgtctcagagaggttttcctgtgctcgccctgtttctctcaggaagccttgctcttttccatcatgcctctaatcacagcttataatcggatatttatttctgtgtctacagtcttgccctgccagactgtaagccccatgtgggcaggcgctcatgattgtttctgattgtttcacgcatgctgctaacccagagcctgggcccaaagctagttagtactcaataaacaatgcattgaaaaaaaaaaaaaaaaanta

SEQ ID NO: 110 - protein, 511 aa, Homo Sapiens [sequence omitted]

SEQ ID NO: 111 - DNA, 1920 bp, Homo Sapiens
  CDS (61)...(1905)
ttggctttggccctcgtcatcctgcccacccagcggggcttcccaacccaccacacagccatggacgggaaggtggcagtgcaagagtatgggcctcctgcagtctcctgggtccccgaggagggagagaagttggaccaggaagacgaggaccaggtgaaggatcggggccaatggaccaacaagatggagtttgtgctgtcagtggccggggagatcattgggctgggcaatgtctggaggtttccctatctctgctacaaaaacggaggtggagccttcttcatcccctacttcatcttcttctttgtctgcggcatcccggtgttcttcctggaggtggcgttgggccaatacaccagccaagggagtgtcacagcctggaggaagatctgccccctcttccagggcattggtctggcatctgtggtcatcgagtcatatttgaatgtctactacatcatcatccttgcctgggctctcttctacctgttcagctccttcacctctgagctgccctggacgacctgcaacaacttttggaacacagagcattgcacggactttctgaaccactcaggagccggcacagtgaccccatttgagaattttacctcacctgtcatggaattctgggagagacgagttctgggcatcacctcgggcatccatgacctgggctccctgcgctgggagctggccctgtgcctcctgctcgcctgggtcatctgctatttctgcatctggaagggggtcaagtccacaggcaaggtggtttatttcacagccacgtttccgtacctgatgcttgtcattttgctgatcagaggtgtcacccttcccggagcctaccagggcatcatctactacttgaagccagatttgttccgcctcaaggaccctcaggtgtggatggatgcgggcacccagatcttcttctcctttgccatctgccaggggtgcctgacagccctgggcagctacaacaagtatcacaacaactgctacaaggactgcatcgccctctgcttcctgaacagtgccaccagctttgtggctgggtttgttgtcttctccatcctgggcttcatgtcccaagagcaaggggtgcccatttctgaagtggccgagtcaggtcctgggctggccttcatcgccttccccaaggctgtgactatgatgcccttatcccagctgtggtcctgcctgttctttatcatgctcatattcctagggctggacagccagtttgtctgtgtggagtgcctggtgacagcctccatagacatgttccccaggcagctccggaagagcgggcggcgcgagctcctcatcctcaccatcgccgtcatgtgctacctgatagggcttttcctggtcaccgagggcgggatgtacatcttccagctgtttgactactatgcttccagtggcatatgcctgctgttcctgtcattgtttgaagtggtctgcataagctgggtgtatggggcggaccgtttctatgacaacattgaggacatgattggctaccggccatggcccctggtgaagatctcctggctcttcctgacccctggactttgcctggccactttcctcttctccttgagcaagtacacccccctcaagtacaacaacgtctatgtgtacccgccctggggatactccattggctggttcctggctctgtcctccatggtctgtgtcccactcttcgtcgtcatcaccctcctgaagactcggggtcctttcaggaagcgtctgcgtcagctcatcacccctgactccagtctgccacagcccaagcaacatccctgcttggatggcagtgctggccggaactttgggccctccccaacaagggaaggactgatagccggggagaaggagacccatttgtagggtgtgaccagaggc

SEQ ID NO: 112 - protein, 614 aa, Homo Sapiens
MDGKVAVQEYGPPAVSWVPEEGEKLDQEDEDQVKDRGQWTNKMEFVLSVAGEIIGLGNVWRFPYLCYKNGGGAFFIPYFIFFFVCGIPVFFLEVALGQYTSQGSVTAWRKICPLFQGIGLASVVIESYLNVYYIIILAWALFYLFSSFTSELPWTTCNNFWNTEHCTDFLNHSGAGTVTPFENFTSPVMEFWERRVLGITSGIHDLGSLRWELALCLLLAWVICYFCIWKGVKSTGKVVYFTATFPYLMLVILLIRGVTLPGAYQGIIYYLKPDLFRLKDPQVWMDAGTQIFFSFAICQGCLTALGSYNKYHNNCYKDCIALCFLNSATSFVAGFVVFSILGFMSQEQGVPISEVAESGPGLAFIAFPKAVTMMPLSQLWSCLFFIMLIFLGLDSQFVCVECLVTASIDMFPRQLRKSGRRELLILTIAVMCYLIGLFLVTEGGMYIFQLFDYYASSGICLLFLSLFEVVCISWVYGADRFYDNIEDMIGYRPWPLVKISWLFLTPGLCLATFLFSLSKYTPLKYNNVYVYPPWGYSIGWFLALSSMVCVPLFVVITLLKTRGPFRKRLRQLITPDSSLPQPKQHPCLDGSAGRNFGPSPTREGLIAGEKETHL

SEQ ID NO: 113 - DNA, 1097 bp, Homo Sapiens
  CDS (11)...(898)
ggcacgagggatggtggacagcgtgtaccggacccgctccctgggggtggcggccgaagggctcccggaccagtacgcggacggggaggcggcgcgcgtgtggcagctgtatatcggagacacccgcagccgcaccgccgagtacaaggcatggctgcttgggctgctgcgccagcacggctgccagcgggtgctcgacgtagcctgtggcactggggtggactccattatgctggtggaagagggcttcagtgtgacgagtgtggatgccagtgacaagatgctgaagtatgcacttaaggagcgctggaaccggcggcacgagcccgccttcgacaagtgggtcatcgaagaagccaactggatgactctggacaaagatgtgccccagtcagcagagggtggctttgatgctgtcatctgccttggaaacagtttcgctcacttgccagactgcaaaggggaccagagtgagcaccggctggcgctgaaaaacattgcgagcatggtgcgggcagggggcctactggtcattgatcatcgcaactacgaccacatcctcagtacaggctgtgcacccccagggaagaacatctactataagagtgacttgaccaaggacgtcacaacatcagtgctgatagtgaacaacaaggcccacatggtgaccctggactatacggtgcaggtgccgggggctggccaggatggctctcctggcttgagtaagttccggctctcctactacccacactgtctggcatccttcacggagctgctccaagcagccttcggaggtaagtgccagcacagcgtcctgggcgacttcaagccttacaagccaggccaaacctacattccctgctacttcatccacgtgctcaagaggacagactgagtgtggcctcagctcccacaagcctctgcccaggcactgctaggctctgtctggaagatggggaccagcagccccacaccagggccagcctctagagcagactacagctggggtgcagggatgtgggttccacagacggaagggtaaacaatatagtctttttcagttcctgcaaaaaaaaaaaaaaaaaaaaaaaaaa

SEQ ID NO: 114 - protein, 295 aa, Homo Sapiens
MVDSVYRTRSLGVAAEGLPDQYADGEAARVWQLYIGDTRSRTAEYKAWLLGLLRQHGCQRVLDVACGTGVDSIMLVEEGFSVTSVDASDKMLKYALKERWNRRHEPAFDKWVIEEANWMTLDKDVPQSAEGGFDAVICLGNSFAHLPDCKGDQSEHRLALKNIASMVRAGGLLVIDHRNYDHILSTGCAPPGKNIYYKSDLTKDVTTSVLIVNNKAHMVTLDYTVQVPGAGQDGSPGLSKFRLSYYPHCLASFTELLQAAFGGKCQHSVLGDFKPYKPGQTYIPCYFIHVLKRTD

SEQ ID NO: 115 - DNA, 3363 bp, Homo Sapiens
  CDS (259)...(3015)
agtgtgggctacccggccactgccctggagctgtggtgactgctgcgtttttctcccatgcacttgcacgtccaggactcctgggagaacttgggccacactccttccttgccctcttgagctcattcgtcaccctgttgggtgagcacagccctagctcaggccactgggcaagccacaccatccaaagaggaggtcctctgccccaggacccccacaccaccccagctccctgttttgctgaggcctggagcccccatggcctcactgagccgagccctacgtgtggctgctgcccaccctcgccagagccctacccggggcatggggccatgcaacctgtccagcgcagctggccccacagccgagaagagtgtgccatatcagcggaccctgaaggagggacagggcacctcggtggtggcccaaggcccaagccggcccctgcccagcacggccaacgtggtggtcattggtggaggcagcttgggctgccagaccctgtaccacctggccaagctgggcatgagtggggcggtgctgctggagcgggagcggctgacctccgggaccacctggcacacggcaggcctgctgtggcagctgcggcccagtgacgtggaggtggagcttctggcccacactcggcgggtggtgagccgggagctggaggaggagacgggactacacacgggctggatccagaatgggggcctcttcatcgcgtccaaccggcagcgcctggacgagtacaagaggctcatgtcgctgggcaaggcgtatggtgtggaatcccatgtgctgagcccggcagagaccaagactctgtacccgctgatgaatgtggacgacctctacgggaccctgtatgtgccgcacgacggtaccatggaccccgctggcacctgtaccaccctcgccagggcagcttctgcccgaggagcacaggtcattgagaactgcccagtgaccggcattcgtgtgtggacggatgattttggggtgcggcgggtcgcgggtgtggagactcagcatggttccatccagacaccctgcgtggtcaactgtgcaggagtgtgggcaagtgctgtgggccggatggctggagtcaaggtcccgctggtggccatgcaccatgcctatgtcgtcaccgagcgcatcgaggggattcagaacatgcccaatgtccgtgatcatgatgcctctgtctacctccgcctccaaggggatgccttgtctgtgggtggctatgaggccaaccccatcttttgggaggaggtgtcagacaagtttgccttcggcctctttgacctggactgggaggtgttcacccagcacattgaaggcgccatcaacagggtccccgtgctggagaagacaggaatcaagtccacggtctgcggccctgaatccttcacgcccgaccacaagcccctgatgggggaggcacctgagctccgagggttcttcctgggctgtggcttcaacagcgcaggaatgatgctgggtggtggctgtgggcaggagctggcccactggatcatccatgggcgcccggagaaggacatgcatggctatgacatcaggcgcttccatcactcgctcacggaccacccccgctggatccgagagcgaagccatgagtcctacgccaagaactactccgtcgtcttcccccacgatgagccgctggccgggcgcaacatgaggagagacccgctgcatgaggaactccttggacaaggctgcgtgttccaggagcggcatggctgggagcgaccgggatggtttcatccccgaggcccagctccggtcctcgagtacgactactacggggcttacgggagccgcgcgcacgaggactacgcctaccgcaggctgctggcagacgagtacaccttcgccttcccgccccaccacgacacgatcaagaaggagtgcctggcctgcagaggggccgccgctgtgtttgacatgtcctacttcgggaagttctacctggtggggctggatgcaaggaaggctgccgactggctcttctccgcagatgtcagccgacccccaggctccaccgtgtacacgtgcatgctcaaccaccgtgggggcaccgagagtgacctgactgtcagccgcctggcacccagccaccaggcctccccgctggcccccgcctttgaaggggacggttactacctggccatgggcggggccgtggcccagcacaactggtcccacatcaccaccgtgctgcaggaccagaagtcccagtgccagctcatcgacagctccgaggacctgggtatgatcagtatccagggcccagccagccgagccattttgcaggaggtgctggacgcagacctgagcaacgaggccttcccgttctccacccacaagctactgagagccgcagggcacctggtccgagccatgcggctgtcctttgtgggggagctgggctgggagctgcacattccaaaggcgtcctgcgtgcctgtgtaccgggctgtgatggccgcgggtgccaagcacggcctcatcaacgcagggtaccgcgccatcgactccctgagcattgagaaaggctaccggcactggcacgcggacctgcggccagacgacagccccctggaggcaggcctggccttcacctgcaagctcaagtcgccggtgcccttcctggggagggaggccctggagcagcagcgggccgcaggcctccgccggcgcctggtgtgcttcaccatggaggacaaagtacccatgtttggcctggaggccatctggaggaacggccaagtggtgggccatgtccggagggctgactttgggttcgccatcgacaagaccatcgcctacggttacatccatgaccccagcggtgggccggtctcgctggactttgtgaagagcggggactatgccctggagagaatgggggtgacctatggtgcccaggctcacctgaagtcgcccttcgaccccaacaacaagagggtgaagggaatctactgagggctcagaccacatgccccatcccatgctgtccatccattctcacaggtcccaaatggccctgggtcccaggaccctggacccagccagaacttgtgccctccctgtccttagcctaggcctagtcctgcgaaaacccccaaaccagatacggacagagaccaagatggcccatcctgtggtcactgactggaaggcagtctctaatccaccccaatcctcccagaaagcaaacctgtaagtgtcttgggctcagggaccatggcttgtagccctttccaagcttctaaaaggtgcttagtaaatacttgataagccccacgtgaaaaaaaaaaaaaaaaaaaaaaa

SEQ ID NO: 116 - protein, 918 aa, Homo Sapiens
MASLSRALRVAAAHPRQSPTRGMGPCNLSSAAGPTAEKSVPYQRTLKEGQGTSVVAQGPSRPLPSTANVVVIGGGSLGCQTLYHLAKLGMSGAVLLERERLTSGTTWHTAGLLWQLRPSDVEVELLAHTRRVVSRELEEETGLHTGWIQNGGLFIASNRQRLDEYKRLMSLGKAYGVESHVLSPAETKTLYPLMNVDDLYGTLYVPHDGTMDPAGTCTTLARAASARGAQVIENCPVTGIRVWTDDFGVRRVAGVETQHGSIQTPCVVNCAGVWASAVGRMAGVKVPLVAMHHAYVVTERIEGIQNMPNVRDHDASVYLRLQGDALSVGGYEANPIFWEEVSDKFAFGLFDLDWEVFTQHIEGAINRVPVLEKTGIKSTVCGPESFTPDHKPLMGEAPELRGFFLGCGFNSAGMMLGGGCGQELAHWIIHGRPEKDMHGYDIRRFHHSLTDHPRWIRERSHESYAKNYSVVFPHDEPLAGRNMRRDPLHEELLGQGCVFQERHGWERPGWFHPRGPAPVLEYDYYGAYGSRAHEDYAYRRLLADEYTFAFPPHHDTIKKECLACRGAAAVFDMSYFGKFYLVGLDARKAADWLFSADVSRPPGSTVYTCMLNHRGGTESDLTVSRLAPSHQASPLAPAFEGDGYYLAMGGAVAQHNWSHITTVLQDQKSQCQLIDSSEDLGMISIQGPASRAILQEVLDADLSNEAFPFSTHKLLRAAGHLVRAMRLSFVGELGWELHIPKASCVPVYRAVMAAGAKHGLINAGYRAIDSLSIEKGYRHWHADLRPDDSPLEAGLAFTCKLKSPVPFLGREALEQQRAAGLRRRLVCFTMEDKVPMFGLEAIWRNGQVVGHVRRADFGFAIDKTIAYGYIHDPSGGPVSLDFVKSGDYALERMGVTYGAQAHLKSPFDPNNKRVKGIY

SEQ ID NO: 117 - DNA, 2431 bp, Homo Sapiens
  CDS (125)...(1639)
ggcacgaggccgggagcagagcgaaccgcaccggcccgagcggagcgccgcacgttcccaaccgcgaggccagacatctgactgttggtgtgagaccagtgctcctggtggtgtgccctgagccatggaggcgcctttgcagacagagatggtggagctggtgcccaatggcaaacactcagaggggctgctcccggtcatcacccccatggcaggcaaccagagggtcgaggaccctgcacggagctgtatggagggcaagagcttcctacagaaaagtcccagcaaggagccacacttcactgacttcgaggggaagacatcattcgggatgtcagtgttcaacctcagcaatgccatcatgggcagcggcatcctgggactcgcctatgccatggccaatacgggcattatccttttcctgttcctgttgacagctgtcgccttgctctccagctactccatccacctgctactcaagtcctcaggggtcgtgggcatccgtgcctatgagcagctgggctaccgtgcctttgggaccccaggaaagctggcagcagccctggccatcacgctccagaacatcggagccatgtccagctacctgtacatcatcaagtctgagctgccacttgtcatacagaccttcctgaacctggaggagaaaacctcggactggtacatgaacgggaactacctggtaatccttgtctctgtcaccatcattctgcccctggcactgatgcggcagcttggctacctgggctactccagcggcttctctcttagctgcatggtgttcttcctaattgcagtcatctacaaaaagttccacgtgccctgcccactgccccccaacttcaacaacaccacaggcaacttcagccacgtggagatcgtgaaggagaaggtgcagctgcaggtcgagcctgaggcttcagccttctgcactcccagctacttcacgctcaactcacagacagcatacaccatccccatcatggccttcgccttcgtctgccaccccgaggtgctgcccatctatactgagctcaaggacccctccaagaagaagatgcagcacatctccaacctgtccatcgctgtcatgtacatcatgtacttcctggctgccctcttcggctacctcaccttctacaacggggtggagtcggagctgctgcacacctacagcaaggtggacccgtttgacgtcctgatcctgtgtgtgcgcgtggccgtgctgacagcagtcacgctcacagtgcccatcgttctgttcccggtgcgccgcgccatccagcagatgctgtttccaaaccaggagttcagctggctgcggcatgtgcttattgccgttggcctgctcacttgtatcaacctgctggtcatctttgcccccaacatcctgggcatctttggggtcatcggtgccacatctgccccattcctcatcttcatcttccctgccatcttctacttccgaatcatgcccacggagaaggagcctgcaagatccacccccaaaatcctggccctgtgttttgctatgcttggcttcttgctgatgaccatgagcttgagcttcatcatcattgactgggcctcagggaccagccggcatggaggaaaccactagggtgaccctcatcctgttctgtctactcaccctagcagccctgcccagactcttcagcccctgctcccatccagtggccagtcgggggaggagaaagacgcgattaacactgtggcattcagccaggccccatgtcctctctgtggaaggtttttgttcaagagccaggaccaaggcccttgggccactaccctgctaggctctggagctgtagaggcttcctgaactgggagcagggtagggctgtcgccttagatcccgcccaagcccctcattccctccttgcacagatgcatacactggggcccagcagctgcctcctgaggtgacacagcctgtaggaacatacacagctgggatcagcctgcagccatcccccgaccctgctgctaggccacggtctgcgccctggggcctcatctcccccagcccacttgttttccccccttttattccctaggcccttttcagactcctgggcccttggatactcttctcccatctcccttcacaggatgacaccctcccataccccatagctggggccagcaggttctgctgagggtggggctggtgtagggacccccaagagacccctgtcctgtcccttcaccagtcctggggaggctgggactccccctgccacaagcctgggccacagctcacattccactgctgggagaagaaacaggccgaggcccagagtggcctgcccccgggagccaaagaccccagtggccacactgggatagggtggggaggctggcagccctcttttataaatctcgtgcc

SEQ ID NO: 118 - protein, 504 aa, Homo Sapiens
MEAPLQTEMVELVPNGKHSEGLLPVITPMAGNQRVEDPARSCMEGKSFLQKSPSKEPHFTDFEGKTSFGMSVFNLSNAIMGSGILGLAYAMANTGIILFLFLLTAVALLSSYSIHLLLKSSGVVGIRAYEQLGYRAFGTPGKLAAALAITLQNIGAMSSYLYIIKSELPLVIQTFLNLEEKTSDWYMNGNYLVILVSVTIILPLALMRQLGYLGYSSGFSLSCMVFFLIAVIYKKFHVPCPLPPNFNNTTGNFSHVEIVKEKVQLQVEPEASAFCTPSYFTLNSQTAYTIPIMAFAFVCHPEVLPIYTELKDPSKKKMQHISNLSIAVMYIMYFLAALFGYLTFYNGVESELLHTYSKVDPFDVLILCVRVAVLTAVTLTVPIVLFPVRRAIQQMLFPNQEFSWLRHVLIAVGLLTCINLLVIFAPNILGIFGVIGATSAPFLIFIFPAIFYFRIMPTEKEPARSTPKILALCFAMLGFLLMTMSLSFIIIDWASGTSRHGGNH

SEQ ID NO: 119 - DNA, 2831 bp, Homo Sapiens
  CDS (160)...(2547)
cttctcccgccggggccgcttgttgcaccgccccgcggcctgcgggagccgctcgccccggccttgtgctcgcgtccgcacccctttcctgtcgccccccggggcccgcaccacagcccggccggcgagaccccggccagaccccgctgcccgcacaaaatgtcggcccggacgccattgccgacggtgaacgagcgggacacggaaaatcatacatctgtggatggatatactgaaccacacatccagcctaccaagtcgagtagcagacagaacatcccccggtgtagaaactccattacgtcagcaacagatgaacagcctcacattggaaattaccgtttacaaaaaacaatagggaagggaaattttgccaaagtcaaattggcaagacacgttctaactggtagagaggttgctgtgaaaataatagacaaaactcagctaaatcctaccagtctacaaaagttatttcgagaagtacgaataatgaagatactgaatcatcctaatatagtaaaattgtttgaagttattgaaacagagaagactctctatttagtcatggaatacgcgagtgggggtgaagtatttgattacttagttgcccatggaagaatgaaagagaaagaggcccgtgcaaaatttaggcagattgtatctgctgtacagtattgtcatcaaaagtacattgttcaccgtgatcttaaggctgaaaaccttctccttgatggtgatatgaatattaaaattgctgactttggttttagtaatgaatttacagttgggaacaaattggacacattttgtggaagcccaccctatgctgctcccgagcttttccaaggaaagaagtatgatgggcctgaagtggatgtgtggagtctgggcgtcattctctatacattagtcagtggctccttgcctttcgatggccagaatttaaaggaactgcgagagcgagttttacgagggaagtaccgtattcccttctatatgtccacagactgtgaaaatcttctgaagaaattattagtcctgaatccaataaagagaggcagcttggaacaaataatgaaagatcgatggatgaatgttggtcatgaagaggaagaactaaagccatatactgagcctgatccggatttcaatgacacaaaaagaatagacattatggtcaccatgggctttgcacgagatgaaataaatgatgccttaataaatcagaagtatgatgaagttatggctacttatattcttctaggtagaaaaccacctgaatttgaaggtggtgaatcgttatccagtggaaacttgtgtcagaggtcccggcccagtagtgacttaaacaacagcactcttcagtcccctgctcacctgaaggtccagagaagtatctcagcaaatcagaagcagcggcgtttcagtgatcatgctggtccatccattcctcctgctgtatcatataccaaaagacctcaggctaacagtgtggaaagtgaacagaaagaggagtgggacaaagatgtggctcgaaaacttggcagcacaacagttggatcaaaaagcgagatgactgcaagccctcttgtagggccagagaggaaaaaatcttcaactattccaagtaacaatgtgtattctggaggtagcatggcaagaaggaatacatatgtctgtgaaaggaccacagatcgatacgtagcattgcagaatggaaaagacagcagccttacggagatgtctgtgagtagcatatcttctgcaggctcttctgtggcctctgctgtcccctcagcacgaccccgccaccagaagtccatgtccacttctggtcatcctattaaagtcacactgccaaccattaaagacggctctgaagcttaccggcctggtacaacccagagagtgcctgctgcttccccatctgctcacagtattagtactgcgactccagaccggacccgttttccccgagggagctcaagccgaagcactttccatggtgaacagctccgggagcgacgcagcgttgcttataatgggccacctgcttcaccatcccatgaaacgggtgcatttgcacatgccagaaggggaacgtcaactggtataataagcaaaatcacatccaaatttgttcgcagggatccaagtgaaggcgaagccagtggcagaaccgacacctcaagaagtacatcaggggaaccaaaagaaagagacaaggaagagggtaaagattctaagccgcgttctttgcggttcacatggagtatgaagaccactagttcaatggaccctaatgacatgatgagagaaatccgaaaagtgttagatgcaaataactgtgattatgagcaaaaagagagatttttgcttttctgtgtccatggagacgctagacaggatagcctcgtgcagtgggagatggaagtctgcaagttgccacgactgtcacttaatggggttcgcttcaagcgaatatctgggacatctattgcctttaagaacattgcatcaaaaatagcaaatgagcttaagctgtaaagaagtccaaatttacaggttcagggaagatacatacatatatgaggtacagtttttgaatgtactggtaatgcctaatgtggtctgcctgtgaatctccccatgtagaatttgcccttaatgcaataaggttatacatagttatgaactgtaaaattaaagtcagtatgaactataataaatatctgtagcttaaaaagtaggttcacatgtacaggtaagtatattgtgtatttctgttcattttctgttcatagagttgtataataaaacatgattgcttt

SEQ ID NO: 120 - protein, 795 aa, Homo Sapiens
MSARTPLPTVNERDTENHTSVDGYTEPHIQPTKSSSRQNIPRCRNSITSATDEQPHIGNYRLQKTIGKGNFAKVKLARHVLTGREVAVKIIDKTQLNPTSLQKLFREVRIMKILNHPNIVKLFEVIETEKTLYLVMEYASGGEVFDYLVAHGRMKEKEARAKFRQIVSAVQYCHQKYIVHRDLKAENLLLDGDMNIKIADFGFSNEFTVGNKLDTFCGSPPYAAPELFQGKKYDGPEVDVWSLGVILYTLVSGSLPFDGQNLKELRERVLRGKYRIPFYMSTDCENLLKKLLVLNPIKRGSLEQIMKDRWMNVGHEEEELKPYTEPDPDFNDTKRIDIMVTMGFARDEINDALINQKYDEVMATYILLGRKPPEFEGGESLSSGNLCQRSRPSSDLNNSTLQSPAHLKVQRSISANQKQRRFSDHAGPSIPPAVSYTKRPQANSVESEQKEEWDKDVARKLGSTTVGSKSEMTASPLVGPERKKSSTIPSNNVYSGGSMARRNTYVCERTTDRYVALQNGKDSSLTEMSVSSISSAGSSVASAVPSARPRHQKSMSTSGHPIKVTLPTIKDGSEAYRPGTTQRVPAASPSAHSISTATPDRTRFPRGSSSRSTFHGEQLRERRSVAYNGPPASPSHETGAFAHARRGTSTGIISKITSKFVRRDPSEGEASGRTDTSRSTSGEPKERDKEEGKDSKPRSLRFTWSMKTTSSMDPNDMMREIRKVLDANNCDYEQKERFLLFCVHGDARQDSLVQWEMEVCKLPRLSLNGVRFKRISGTSIAFKNIASKIANELKL

SEQ ID NO: 121 - DNA, 1811 bp, Homo Sapiens
  CDS (102)...(1628)
gaattccgggagcccctctgcctagcactgctcccccaaggctcccagaaatctcaggtcagaggcacggacagcctctggagctctcgtctggtgggaccatgaactgccagcagctgtggctgggcttcctactccccatgacagtctcaggccgggtcctggggcttgcagaggtggcgcccgtggactacctgtcacaatatgggtacctacagaagcctctagaaggatctaataacttcaagccagaagatatcaccgaggctctgagagcttttcaggaagcatctgaacttccagtctcaggtcagctggatgatgccacaagggcccgcatgaggcagcctcgttgtggcctagaggatcccttcaaccagaagacccttaaatacctgttgctgggccgctggagaaagaagcacctgactttccgcatcttgaacctgccctccacccttccaccccacacagcccgggcagccctgcgtcaagccttccaggactggagcaatgtggctcccttgaccttccaagaggtgcaggctggtgcggctgacatccgcctctccttccatggccgccaaagctcgtactgttccaatacttttgatgggcctgggagagtcctggcccatgccgacatcccagagctgggcagtgtgcacttcgacgaagacgagttctggactgaggggacctaccgtggggtgaacctgcgcatcattgcagcccatgaagtgggccatgctctggggcttgggcactcccgatattcccaggccctcatggccccagtctacgagggctaccggccccactttaagctgcacccagatgatgtggcagggatccaggctctctatggcaagaagagtccagtgataagggatgaggaagaagaagagacagagctgcccactgtgcccccagtgcccacagaacccagtcccatgccagacccttgcagtagtgaactggatgccatgatgctggggccccgtgggaagacctatgctttcaagggggactatgtgtggactgtatcagattcaggaccgggccccttgttccgagtgtctgccctttgggaggggctccccggaaacctggatgctgctgtctactcgcctcgaacacaatggattcacttctttaagggagacaaggtgtggcgctacattaatttcaagatgtctcctggcttccccaagaagctgaatagggtagaacctaacctggatgcagctctctattggcctctcaaccaaaaggtgttcctctttaagggctccgggtactggcagtgggacgagctagcccgaactgacttcagcagctaccccaaaccaatcaagggtttgtttacgggagtgccaaaccagccctcggctgctatgagttggcaagatggccgagtctacttcttcaagggcaaagtctactggcgcctcaaccagcagcttcgagtagagaaaggctatcccagaaatatttcccacaactggatgcactgtcgtccccggactatagacactaccccatcaggtgggaataccactccctcaggtacgggcataaccttggataccactctctcagccacagaaaccacgtttgaatactgactgctcacccacagacacaatcttggacattaacccctgaggctccaccacccaccctttcatttcccccccagaagcctaaggcctaatagctgaatgaaatacctgtctgctcagtagaaccttgcaggtgctgtagcaggcgcaagaccgtagatctcaggcctctaacacttccaactc

SEQ ID NO: 122 - protein, 508 aa, Homo Sapiens
MNCQQLWLGFLLPMTVSGRVLGLAEVAPVDYLSQYGYLQKPLEGSNNFKPEDITEALRAFQEASELPVSGQLDDATRARMRQPRCGLEDPFNQKTLKYLLLGRWRKKHLTFRILNLPSTLPPHTARAALRQAFQDWSNVAPLTFQEVQAGAADIRLSFHGRQSSYCSNTFDGPGRVLAHADIPELGSVHFDEDEFWTEGTYRGVNLRIIAAHEVGHALGLGHSRYSQALMAPVYEGYRPHFKLHPDDVAGIQALYGKKSPVIRDEEEEETELPTVPPVPTEPSPMPDPCSSELDAMMLGPRGKTYAFKGDYVWTVSDSGPGPLFRVSALWEGLPGNLDAAVYSPRTQWIHFFKGDKVWRYINFKMSPGFPKKLNRVEPNLDAALYWPLNQKVFLFKGSGYWQWDELARTDFSSYPKPIKGLFTGVPNQPSAAMSWQDGRVYFFKGKVYWRLNQQLRVEKGYPRNISHNWMHCRPRTIDTTPSGGNTTPSGTGITLDTTLSATETTFEY

SEQ ID NO: 123 - DNA, 2639 bp, Homo Sapiens
  CDS (148)...(2055)
ctctaaaggccgcgggccggcggctgaggccaccccggcggcggctggagagcgaggaggagcgggtggccccgcgctgcgcccgccctcgcctcacctggcgcaggtggacacctgccgaggtgtgtgccctccggcccctgaagcatggccagcagcggcatggctgacagcgccaaccacctgcccttctttttcggcaacatcacccgggaggaggcagaagattacctggtccaggggggcatgagtgatgggctttatttgctgcgccagagccgcaactacctgggtggcttcgccctgtccgtggcccacgggaggaaggcacaccactacaccatcgagcgggagctgaatggcacctacgccatcgccggtggcaggacccatgccagccccgccgacctctgccactaccactcccaggagtctgatggcctggtctgcctcctcaagaagcccttcaaccggccccaaggggtgcagcccaagactgggccctttgaggatttgaaggaaaacctcatcagggaatatgtgaagcagacatggaacctgcagggtcaggctctggagcaggccatcatcagtcagaagcctcagctggagaagctgatcgctaccacagcccatgaaaaaatgccttggttccatggaaaaatctctcgggaagaatctgagcaaattgtcctgataggatcaaagacaaatggaaagttcctgatccgagccagagacaacaacggctcctacgccctgtgcctgctgcacgaagggaaggtgctgcactatcgcatcgacaaagacaagacagggaagctctccatccccgagggaaagaagttcgacacgctctggcagctagtcgagcattattcttataaagcagatggtttgttaagagttcttactgtcccatgtcaaaaaatcggcacacagggaaatgttaattttggaggccgtccacaacttccaggttcccatcctgcgacttggtcagcgggtggaataatctcaagaatcaaatcatactccttcccaaagcctggccacagaaagtcctcccctgcccaagggaaccggcaagagagtactgtgtcattcaatccgtatgagccagaacttgcaccctgggctgcagacaaaggcccccagagagaagccctacccatggacacagaggtgtacgagagcccctacgcggaccccgaggagatcaggcccaaggaggtttacctggaccgaaagctgctgacgctggaagacaaagaactgggctctggtaattttggaactgtgaaaaagggctactaccaaatgaaaaaagttgtgaaaaccgtggctgtgaaaatactgaaaaacgaggccaatgaccccgctcttaaagatgagttattagcagaagcaaatgtcatgcagcagctggacaacccgtacatcgtgcggatgatcgggatatgcgaggccgagtcctggatgctggttatggagatggcagaacttggtcccctcaataagtatttgcagcagaacagacatgtcaaggataagaacatcatagaactggttcatcaggtttccatgggcatgaagtacttggaggagagcaattttgtgcacagagatctggctgcaagaaatgtgttgctagttacccaacattacgccaagatcagtgatttcggactttccaaagcactgcgtgctgatgaaaactactacaaggcccagacccatggaaagtggcctgtcaagtggtacgctccggaatgcatcaactactacaagttctccagcaaaagcgatgtctggagctttggagtgttgatgtgggaagcattctcctatgggcagaagccatatcgagggatgaaaggaagtgaagtcaccgctatgttagagaaaggagagcggatggggtgccctgcagggtgtccaagagagatgtacgatctcatgaatctgtgctggacatacgatgtggaaaacaggcccggattcgcagcagtggaactgcggctgcgcaattactactatgacgtggtgaactaaccgctcccgcacctgtcggtggctgcctttgatcacaggagcaatcacaggaaaatgtatccagaggaattgattgtcagccacctccctctgccagtcgggagagccaggcttggatggaacatgcccacaacttgtcacccaaagcctgtcccaggactcaccctccacaaagcaaaggcagtcccgggagaaaagacggatggcaggatccaaggggctagctggatttgtttgttttcttgtctgtgtgattttcatacaggttatttttacgatctgtttccaaatccctttcatgtctttccacttctctgggtcccggggtgcatttgttactcatcgggcccagggacattgcagagtggcctagagcactctcaccccaagcggccttttccaaatgcccaaggatgccttagcatgtgactcctgaaggaaggcaaaggcagaggaatttggctgcttctacggccatgagactgatccctggccactgaaaagctttcctgacaataaaaatgttttgaggctttaaaaagaaaaaaaaaaaaaaaaaaaaaaaaaaaaaactttagagcaca

SEQ ID NO: 124 - protein, 635 aa, Homo Sapiens
MASSGMADSANHLPFFFGNITREEAEDYLVQGGMSDGLYLLRQSRNYLGGFALSVAHGRKAHHYTIERELNGTYAIAGGRTHASPADLCHYHSQESDGLVCLLKKPFNRPQGVQPKTGPFEDLKENLIREYVKQTWNLQGQALEQAIISQKPQLEKLIATTAHEKMPWFHGKISREESEQIVLIGSKTNGKFLIRARDNNGSYALCLLHEGKVLHYRIDKDKTGKLSIPEGKKFDTLWQLVEHYSYKADGLLRVLTVPCQKIGTQGNVNFGGRPQLPGSHPATWSAGGIISRIKSYSFPKPGHRKSSPAQGNRQESTVSFNPYEPELAPWAADKGPQREALPMDTEVYESPYADPEEIRPKEVYLDRKLLTLEDKELGSGNFGTVKKGYYQMKKVVKTVAVKILKNEANDPALKDELLAEANVMQQLDNPYIVRMIGICEAESWMLVMEMAELGPLNKYLQQNRHVKDKNIIELVHQVSMGMKYLEESNFVHRDLAARNVLLVTQHYAKISDFGLSKALRADENYYKAQTHGKWPVKWYAPECINYYKFSSKSDVWSFGVLMWEAFSYGQKPYRGMKGSEVTAMLEKGERMGCPAGCPREMYDLMNLCWTYDVENRPGFAAVELRLRNYYYDVVN

SEQ ID NO: 125 - DNA, 2146 bp, Homo Sapiens
  CDS (220)...(1503)
atgggttcagactttatgccctgaaaagatccttccagccctggccatcttggacttctggagctaccctggctcacaggggtcttgttgccctgggtgtccccagttcttgaaaagaatcagcctgggaggggccacaccctgaccatccccctttatcccttctgagatgtttgttaggaagtctgggtccaggggatatcatttcttgttccatccatgcaggggttgcttacctcgggtaggaaaccctcaggcggtggcaggtgcacaggtaggggaggatggagagggcagtggtgcctgaagccctggatgggcggagctgaccccccaacaccaactctatcatgcctgctcctccctgtccccccagagctgcctgatcattgctacagaatgaactctagcccagctgggaccccaagtccacagccctccagggccaatgggaacatcaacctggggccttcagccaacccaaatgcccagcccacggacttcgacttcctcaaagtcatcggcaaagggaactacgggaaggtcctactggccaagcgcaagtctgatggggcgttctatgcagtgaaggtactacagaaaaagtccatcttaaagaagaaagagcagagccacatcatggcagagcgcagtgtgcttctgaagaacgtgcggcaccccttcctcgtgggcctgcgctactccttccagacacctgagaagctctacttcgtgctcgactatgtcaacgggggagagctcttcttccacctgcagcgggagcgccggttcctggagccccgggccaggttctacgctgctgaggtggccagcgccattggctacctgcactccctcaacatcatttacagggatctgaaaccagagaacattctcttggactgccagggacacgtggtgctgacggattttggcctctgcaaggaaggtgtagagcctgaagacaccacatccacattctgtggtacccctgagtacttggcacctgaagtgcttcggaaagagccttatgatcgagcagtggactggtggtgcttgggggcagtcctctacgagatgctccatggcctgccgcccttctacagccaagatgtatcccagatgtatgagaacattctgcaccagccgctacagatccccggaggccggacagtggccgcctgtgacctcctgcaaagccttctccacaaggaccagaggcagcggctgggctccaaagcagactttcttgagattaagaaccatgtattcttcagccccataaactgggatgacctgtaccacaagaggctaactccacccttcaacccaaatgtgacaggacctgctgacttgaagcattttgacccagagttcacccaggaagctgtgtccaagtccattggctgtacccctgacactgtggccagcagctctggggcctcaagtgcattcctgggattttcttatgcgccagaggatgatgacatcttggattgctagaagagaaggacctgtgaaactactgaggccagctggtattagtaaggaattaccttcagctgctaggaagagcgactcaaactaacaatggcttcaacgagaagcaggtttattttttccagcacataaaagaaaaataatgtttcggagtccaggactggcaggacaggtcatcagatactcagaggctgtatctctgccctgccaaccttgacaaatggcttccaatgttaggtttgctacaagatggttactggagctctagctgcctattttgtgtttagggaagggaaaatggaggaaaggggagaagagcaaagggcgcttttaaagagctttcccaaaagctccccccaatgacttttgcttccatctcactaaccacccacccctacctggaatggaggctgggaaatgtggcttatttgctgggtacgtgactatccctaataacaaaggggttttgaccctaagacattaggggagaatgttgggtaggcagccagccctcttttaccatagggcctcctggtgtttggattttgatctcaatgtgtaaaatgacagagatgtaacaagctcatagggtatcaatatctcttattgttctatgttgaaaaaaaaaaaaaaaaaaaaaaaaaaa

SEQ ID NO: 126 - protein, 427 aa, Homo Sapiens
MQGLLTSGRKPSGGGRCTGRGGWRGQWCLKPWMGGADPPTPTLSCLLLPVPPELPDHCYRMNSSPAGTPSPQPSRANGNINLGPSANPNAQPTDFDFLKVIGKGNYGKVLLAKRKSDGAFYAVKVLQKKSILKKKEQSHIMAERSVLLKNVRHPFLVGLRYSFQTPEKLYFVLDYVNGGELFFHLQRERRFLEPRARFYAAEVASAIGYLHSLNIIYRDLKPENILLDCQGHVVLTDFGLCKEGVEPEDTTSTFCGTPEYLAPEVLRKEPYDRAVDWWCLGAVLYEMLHGLPPFYSQDVSQMYENILHQPLQIPGGRTVAACDLLQSLLHKDQRQRLGSKADFLEIKNHVFFSPINWDDLYHKRLTPPFNPNVTGPADLKHFDPEFTQEAVSKSIGCTPDTVASSSGASSAFLGFSYAPEDDDILDC

SEQ ID NO: 127 - DNA, 1900 bp, Homo Sapiens
  CDS (514)...(1629)
gaattcggcacgagtcagggaagcagccccggcggccagcagggagctcaggacagagcaggctccctgggaagcctccgggtgataggggtgttccagctgcggcgctctgggggttcagagggggatcttgaatgaacaaatgaatgaactgctttctgggcaaacagccacagccagaggagcctgtgattggcagaaagaagccagggtgtgcaagtctccccaacagcctcgagtggcctgcagtcacagggaaccctcaggaagaccttccgggcagagaccagagggaagcccatctctccagcagaactgcttggatttttctaccaggaggctcagggctctgcaacaatgatagcagaagctgatggcatctagagatctaggctgggactagcacagcatcacttctaccactttctgttggtcacagcaactcaccatgccagtgcagattcaaggggaggagaaatagagtccacttcttgatgggaggcgtgacatagaatggaggatgaagattacaacacttccatcagttacggtgatgaataccctgattatttagactccattgtggttttggaggacttatcccccttggaagccagggtgaccaggatcttcctggtggtggtctacagcatcgtctgcttcctcgggattctgggcaatggtctggtgatcatcattgccaccttcaagatgaagaagacagtgaacatggtctggttcctcaacctggcagtggcagatttcctgttcaacgtcttcctcccaatccatatcacctatgccgccatggactaccactgggttttcgggacagccatgtgcaagatcagcaacttccttctcatccacaacatgttcaccagcgtcttcctgctgaccatcatcagctctgaccgctgcatctctgtgctcctccctgtctggtcccagaaccaccgcagcgttcgcctggcttacatggcctgcatggtcatctgggtcctggctttcttcttgagttccccatctctcgtcttccgggacacagccaacctgcatgggaaaatatcctgcttcaacaacttcagcctgtccacacctgggtcttcctcgtggcccactcactcccaaatggaccctgtggggtatagccggcacatggtggtgactgtcacccgcttcctctgtggcttcctggtcccagtcctcatcatcacagcttgctacctcaccatcgtgtgcaaactgcagcgcaaccgcctggccaagaccaagaagcccttcaagattattgtgaccatcatcattaccttcttcctctgctggtgcccctaccacacactcaacctcctagagctccaccacactgccatgcctggctctgtcttcagcctgggtttgcccctggccactgcccttgccattgccaacagctgcatgaaccccattctgtatgttttcatgggtcaggacttcaagaagttcaaggtggccctcttctctcgcctggtcaatgctctaagtgaagatacaggccactcttcctaccccagccatagaagctttaccaagatgtcatcaatgaatgagaggacttctatgaatgagagggagaccggcatgctttgatcctcactgtggaacccctcaatggactctctcaacccagggacacccaaggatatgtcttctgaagatcaaggcaagaacctctttagcatccaccaattttcactgcattttgcatgggatgaacagtgttttatgctgggaatctagggcctggaacccctttcttctagtggacagaacatgctgtgttccatacagccttggactagcaatttatgcttcttgggaggccagccttgactgactcaaagcaaaaaaggaagaattc

SEQ ID NO: 128 - protein, 371 aa, Homo Sapiens
MEDEDYNTSISYGDEYPDYLDSIVVLEDLSPLEARVTRIFLVVVYSIVCFLGILGNGLVIIIATFKMKKTVNMVWFLNLAVADFLFNVFLPIHITYAAMDYHWVFGTAMCKISNFLLIHNMFTSVFLLTIISSDRCISVLLPVWSQNHRSVRLAYMACMVIWVLAFFLSSPSLVFRDTANLHGKISCFNNFSLSTPGSSSWPTHSQMDPVGYSRHMVVTVTRFLCGFLVPVLIITACYLTIVCKLQRNRLAKTKKPFKIIVTIIITFFLCWCPYHTLNLLELHHTAMPGSVFSLGLPLATALAIANSCMNPILYVFMGQDFKKFKVALFSRLVNALSEDTGHSSYPSHRSFTKMSSMNERTSMNERETGML

SEQ ID NO: 129 - DNA, 1235 bp, Homo Sapiens
  CDS (42)...(1028)
gcttctgtactgccaggtccgggtcggcggctgcactgcggatgagaccggtgcgactcatgaaggtgttcgtcacccgcaggatacccgccgagggtagggtcgcgctcgcccgggcggcagactgtgaggtggagcagtgggactcggatgagcccatccctgccaaggagctagagcgaggtgtggcgggggcccacggcctgctctgcctcctctccgaccacgtggacaagaggatcctggatgctgcaggggccaatctcaaagtcatcagcaccatgtctgtgggcatcgaccacttggctttggatgaaatcaagaagcgtgggatccgagttggctacaccccagatgtcctgacagataccaccgccgaactcgcagtctccctgctacttaccacctgccgccggttgccggaggccatcgaggaagtgaagaatggtggctggacctcgtggaagcccctctggctgtgtggctatggactcacgcagagcactgtcggcatcatcgggctggggcgcataggccaggccattgctcggcgtctgaaaccattcggtgtccagagatttctgtacacagggcgccagcccaggcctgaggaagcagcagaattccaggcagagtttgtgtctacccctgagctggctgcccaatctgatttcatcgtcgtggcctgctccttaacacctgcaaccgagggactctgcaacaaggacttcttccagaagatgaaggaaacagctgtgttcatcaacatcagcaggggcgacgtcgtaaaccaggacgacctgtaccaggccttggccagtggtaagattgcagctgctggactggatgtgacgagcccagaaccactgcctacaaaccaccctctcctgaccctgaagaactgtgtgattctgccccacattggcagtgccacccacagaacccgcaacaccatgtccttgttggcagctaacaacttgctggctggcctgagaggggagccgatgcctagtgaactcaagctgtagccaaacagtagagatggagggccgggaagcaaaccgtgccctggtattgtcagacacacccaggcttgatttggatccacaggcagagccaagggaaggtgtgattctctgaggaaagagtgattctgatatatgtacttgtcacattggtgttggacacatttgcgccaaaagtatggtaattctattattaaataattctctgag

SEQ ID NO: 130 - protein, 328 aa, Homo Sapiens
MRPVRLMKVFVTRRIPAEGRVALARAADCEVEQWDSDEPIPAKELERGVAGAHGLLCLLSDHVDKRILDAAGANLKVISTMSVGIDHLALDEIKKRGIRVGYTPDVLTDTTAELAVSLLLTTCRRLPEAIEEVKNGGWTSWKPLWLCGYGLTQSTVGIIGLGRIGQAIARRLKPFGVQRFLYTGRQPRPEEAAEFQAEFVSTPELAAQSDFIVVACSLTPATEGLCNKDFFQKMKETAVFINISRGDVVNQDDLYQALASGKIAAAGLDVTSPEPLPTNHPLLTLKNCVILPHIGSATHRTRNTMSLLAANNLLAGLRGEPMPSELKL
